(19) United States
(12) Patent Application Publication
(10) Pub. No.: US 2023/0357870 A1
(43) Pub. Date: Nov. 9, 2023

(54) CORONAVIRUS REPLICONS FOR ANTIVIRAL SCREENING AND TESTING

(71) Applicant: MERCK SHARP & DOHME LLC, Rahway, NJ (US)

(72) Inventors: Xi HE, Philadelphia, PA (US); Shuo QUAN, Cranbury, NJ (US); Dai WANG, Blue Bell, PA (US); Min XU, Ambler, PA (US)

(73) Assignee: MERCK SHARP & DOHME LLC, Rahway, NJ (US)

(21) Appl. No.: 18/246,408

(22) PCT Filed: Sep. 23, 2021
(86) PCT No.: PCT/US2021/051626

§ 371 Date: Mar. 23, 2023

Related U.S. Application Data
(60) Provisional application No. 63/083,852, filed on Sep. 25, 2020.

(51) Int. Cl. C12Q 1/6897; C12N 15/86

(52) U.S. Cl. CPC C12Q 1/6897; C12N 15/86; C12Q 2600/136; C12Q 2600/158; C12N 2770/20043

(57) ABSTRACT

This application provides materials and methods related to replication competent, noninfectious coronavirus reporter replicons, such as for SARS-CoV-2, MERS, or SARS-CoV-1 comprising at least one coronavirus gene and at least one reporter gene. The application also provides methods for assaying candidate agents for inhibition of coronavirus viral replication.

### CROSS-REFERENCE TO RELATED APPLICATIONS

[0001] This application claims the benefit of U.S. Provisional Patent Application Ser. No. 63/083,852 filed Sep. 25, 2020, the entire contents of which are incorporated by reference herein.

### REFERENCE TO SEQUENCE LISTING SUBMITTED ELECTRONICALLY

[0002] The instant application contains a Sequence Listing which has been submitted electronically in ASCII format and is hereby incorporated by reference in its entirety. The ASCII copy, created on Sep. 21, 2021, is named 25110WOPCT-SEQTXT-21SEP2021.txt and is 662,700 bytes in size.

### FIELD

[0003] Noninfectious reporter replicons for coronavirus.

### BACKGROUND OF THE INVENTION

[0004] The current pandemic of coronavirus disease 2019 (COVID-19) caused by the newly emerged coronavirus, severe acute respiratory syndrome coronavirus 2 (SARS-CoV-2) has led to nearly 206 million infections and over 4.3 million deaths as of Aug. 12, 2021. In response to this public health emergency, an unprecedented swift and concerted effort has been launched globally to identify safe and effective therapeutics and vaccines against the rapidly spreading virus. Presently, about 2000 SARS-CoV-2 investigational programs and clinical trials have been registered (Thorlund, Kristian et al. “A real-time dashboard of clinical trials for COVID-19.” The Lancet. Digital health vol. 2, 6 (2020): e286-e287. doi:10.1016/S2589-7500(20)30086-8). However, most of the treatment trials focus on repurposing a limited number of existing antivirals approved for other indications, such as lopinavir/ritonavir or remdesivir (GS-5734™; VEKLURY®). Although compounds directly targeting SARS-CoV-2 are urgently needed, development of such a compound typically requires a decade of research. One of the major bottlenecks is that assays used to screen and test SARS-CoV-2 compounds involving the live virus must be performed in BSL3 laboratories, which are not readily available to most researchers.

### SUMMARY OF THE INVENTION

[0005] The present disclosure provides materials and methods relating to a replication competent, but noninfectious coronavirus reporter replicons, including SARS-CoV-2, SARS-CoV-1 and MERS, for evaluating the potencies of RNA-dependent RNA polymerase inhibitors and/or protease inhibitors.

[0006] In accordance with the description, a coronavirus reporter replicon comprising: one or more coronavirus genes encoding one or more coronavirus proteins for coronavirus viral RNA replication; and at least one reporter gene; wherein the coronavirus reporter replicon does not comprise at least one of a functional coronavirus spike ORF, envelope ORF, or membrane ORF, and wherein the coronavirus reporter replicon is replication competent. In some embodiments, the one or more coronavirus genes comprise or are transcribed into a nucleic acid sequence that is a target for a candidate antiviral agent; or the one or more coronavirus genes encode a protein target for a candidate antiviral agent, and wherein the coronavirus reporter replicon is replication competent.

[0007] In some embodiments, the one or more coronavirus genes are SARS-CoV-2 genes chosen from ORF1a (positions 266-13,480 of SEQ ID NO: 1), ORF1ab (positions 266-21,555 of SEQ ID NO: 1), ORF3a (positions 25,393-26,220 of SEQ ID NO: 1), ORF6 (positions 27,202-27,387 of SEQ ID NO: 1), ORF7a (positions 27,394-27,759 of SEQ ID NO: 1), ORF7b (positions 27,756-27,887 of SEQ ID NO: 1), ORF8 (positions 27,894-28,259 of SEQ ID NO: 1), and ORF10 (positions 29,558-29,674 of SEQ ID NO: 1), and sequences are at least 90%, 91%, 92%, 93%, 94%, 95%, 96%, 97%, 98%, or 99% homologous to those genes. In some embodiments, the one or more SARS-CoV-2 genes comprise ORF1ab (positions 266-21,555 of SEQ ID NO: 1), ORF3a (positions 25,393-26,220 of SEQ ID NO: 1), ORF6 (positions 27,202-27,387 of SEQ ID NO: 1), ORF7a/b (positions 27,394-27,887 of SEQ ID NO: 1), ORF8 (positions 27,894-28,259 of SEQ ID NO: 1), and ORF10 (positions 29,558-29,674 of SEQ ID NO: 1), and sequences that are at least 90%, 91%, 92%, 93%, 94%, 95%, 96%, 97%, 98%, or 99% homologous to those genes. In some embodiments, the one or more SARS-CoV-2 genes comprise ORF1ab (positions 266-21,555 of SEQ ID NO: 1), ORF3a (positions 25,393-26,220 of SEQ ID NO: 1), ORF6 (positions 27,202-27,387 of SEQ ID NO: 1), ORF7a/b (positions 27,394-27,887 of SEQ ID NO: 1), ORF8 (positions 27,894-28,259 of SEQ ID NO: 1), and ORF10 (positions 29,558-29,674 of SEQ ID NO: 1).

[0008] In some embodiments of the coronavirus reporter replicon disclosed herein, the one or more coronavirus genes are Middle East Respiratory Syndrome (MERS) genes chosen from ORF1a (positions 279-21,514 of SEQ ID NO: 27), ORF3 (positions 25,532-25,843 of SEQ ID NO: 27), ORF4a (positions 25,852-26,181 of SEQ ID NO: 27), ORF4b (positions 26,093-26,833 of SEQ ID NO: 27), ORF5 (positions 26,840-27-514 of SEQ ID NO: 27), and ORF8b (positions 28,762-29,100 of SEQ ID NO: 27). In some embodiments, the one or more MERS genes comprise ORF1a (positions 279-21,514 of SEQ ID NO: 27), ORF3 (positions 25,532-25,843 of SEQ ID NO: 27), ORF4a (positions 25,852-26,181 of SEQ ID NO: 27), ORF4b (positions 26,093-26,833 of SEQ ID NO: 27), ORF5 (positions 26,840-27-514 of SEQ ID NO: 27), and ORF8b (positions 28,762-29,100 of SEQ ID NO: 27).

[0009] In some embodiments of the coronavirus reporter replicon disclosed herein, the one or more coronavirus genes are SARS-CoV-1 genes chosen from ORF1ab (positions 250-21,467 of SEQ ID NO: 31), ORF3a (positions 25,253-26,077 of SEQ ID NO: 31), ORF6 (positions 27,059-27,250 of SEQ ID NO: 31), ORF7a (positions 27,258-27,626 of SEQ ID NO: 32), ORF7b (positions 27,623-27,757 of SEQ ID NO: 31), ORF8a (positions 27,764-27,883 of SEQ ID NO: 31), and ORF8b (positions 27,849-28,103 of SEQ ID NO: 31). In some embodiments, the one or more SARS-CoV-1 genes comprise ORF1ab (positions 250-21,467 of SEQ ID NO: 31), ORF3a (positions 25,253-26,077 of SEQ ID NO: 31), ORF6 (positions 27,059-27,250 of SEQ ID NO: 31), ORF7a (positions 27,258-27,626 of SEQ ID NO: 32), ORF7b (positions 27,623-27,757 of SEQ ID NO: 31), ORF8a (positions 27,764-27,883 of SEQ ID NO: 31), and ORF8b (positions 27,849-28,103 of SEQ ID NO: 31).

[0010] In some embodiments, the coronavirus reporter replicon does not comprise a functional coronavirus spike ORF. In some embodiments, the coronavirus reporter replicon does not comprise a functional coronavirus envelope ORF. In some embodiments, the coronavirus reporter replicon does not comprise a functional coronavirus membrane ORF. In some embodiments, the coronavirus reporter replicon does not comprise a functional coronavirus spike ORF, envelope ORF, or membrane ORF. In some embodiments, the coronavirus reporter replicon does not comprise at least one of a functional spike ORF, envelope ORF, or membrane ORF.

[0011] In some embodiments, one or more of the functional spike ORF, the envelope ORF, and the membrane ORF is replaced with the reporter gene. In some embodiments, one or more of the functional spike ORF, the envelope ORF, and the membrane ORF is replaced with a selection gene.

[0012] In some embodiments, at least one of the coronavirus genes encodes RNA-dependent RNA polymerase (RdRp). In some embodiments, the RdRp comprises at least one mutation compared to SEQ ID NO: 9. In some embodiments, the RdRp sequence is at least 90%, 91%, 92%, 93%, 94%, 95%, 96%, 97%, 98%, or 99% homologous to SEQ ID NO: 9.

[0013] In some embodiments, at least one of the coronavirus genes is the protease Mpro.

[0014] In some embodiments, the at least one reporter gene comprises a bioluminescent reporter gene, a fluorescent protein gene, and/or an enzymatic reporter gene. In some embodiments, the at least one reporter gene comprises a gene for firefly luciferase, Renilla luciferase, nanoluciferase, Gaussia luciferase, GFP, eGFP, RFP, mCherry, DsRed, β-lactamase, β-galactosidase, and/or secreted alkaline phosphatase. In some embodiments, the at least one reporter gene comprises firefly luciferase. In some embodiments, the at least one reporter gene comprises GFP. In some embodiments, the at least one reporter gene comprises a fusion gene of firefly luciferase and GFP.

[0015] In some embodiments, the coronavirus reporter replicon further comprises a selection gene. In some embodiments, the selection gene comprises an antibiotic resistance gene. In some embodiments, the selection gene imparts resistance to neomycin, puromycin, and/or blasticidin. In some embodiments, the selection gene comprises neomycin phosphotransferase, puromycin N-acetyltransferase, or blasticidin resistance gene.

[0016] In some embodiments, the coronavirus reporter replicon further comprises a nucleocapsid ORF. In some embodiments, the coronavirus reporter replicon comprises replicase complex ORF1ab, a reporter gene, a selection gene, and a nucleocapsid ORF. In some embodiments, the coronavirus reporter replicon comprises an ORF1a, an ORF1ab, a fusion gene of firefly luciferase and GFP, a neomycin phosphotransferase gene, and a nucleocapsid ORF.

[0017] In some embodiments, the coronavirus reporter replicon comprises nucleotides 284-28,234 of SEQ ID NO: 2, nucleotides 284-26,118 of SEQ ID NO: 5, nucleotides 296-28,103 SEQ ID NO: 28, nucleotides 296-28,104 of SEQ ID NO: 29, nucleotides 296-28,034 of SEQ ID NO: 30, or nucleotides 283-27,898 SEQ ID NO: 32, or a sequence that is 90%, 91%, 92%, 93%, 94%, 95%, 96%, 97%, 98%, or 99% homologous to 284-28,234 of SEQ ID NO: 2, nucleotides 284-26,118 of SEQ ID NO: 5, nucleotides 296-28,103 SEQ ID NO: 28, nucleotides 296-28,104 of SEQ ID NO: 29, nucleotides 296-28,034 of SEQ ID NO: 30, or nucleotides 283-27,898 SEQ ID NO: 32. In some embodiments, the coronavirus reporter replicon comprises nucleotides 284-28,234 of SEQ ID NO: 2 or a sequence that is 90%, 91%, 92%, 93%, 94%, 95%, 96%, 97%, 98%, or 99% homologous to nucleotides 19-28,237 of SEQ ID NO: 2. In some embodiments, the coronavirus reporter replicon comprises nucleotides 284-26,118 of SEQ ID NO: 5 or a sequence that is 90%, 91%, 92%, 93%, 94%, 95%, 96%, 97%, 98%, or 99% homologous to nucleotides 20-28,327 of SEQ ID NO: 5. In some embodiments, the coronavirus reporter replicon comprises nucleotides 296-28,103 of SEQ ID NO: 28 or a sequence that is 90%, 91%, 92%, 93%, 94%, 95%, 96%, 97%, 98%, or 99% homologous to nucleotides 296-28,103 of SEQ ID NO: 28. In some embodiments, the coronavirus reporter replicon comprises nucleotides 296-28,104 of SEQ ID NO: 29 or a sequence that is 90%, 91%, 92%, 93%, 94%, 95%, 96%, 97%, 98%, or 99% homologous to nucleotides 296-28,104 of SEQ ID NO: 29. In some embodiments, the coronavirus reporter replicon comprises nucleotides 296-28,034 of SEQ ID NO: 30 or a sequence that is 90%, 91%, 92%, 93%, 94%, 95%, 96%, 97%, 98%, or 99% homologous to nucleotides 296-28,034 of SEQ ID NO: 30. In some embodiments, the coronavirus reporter replicon comprises nucleotides 283-27,898 of SEQ ID NO: 32 or a sequence that is 90%, 91%, 92%, 93%, 94%, 95%, 96%, 97%, 98%, or 99% homologous to nucleotides 283-27,898 of SEQ ID NO: 32.

[0018] In some embodiments, the coronavirus reporter replicon comprises a DNA molecule. In some embodiments, the coronavirus reporter replicon comprises an RNA molecule.

[0019] The application also provides a vector comprising the sequence encoding the coronavirus reporter replicon of any one of the foregoing embodiments.

[0020] In one embodiment, the application provides a vector further comprising at least one promoter; and a terminator cassette. In some embodiments, the vector further comprises a reporter replicon chosen from SEQ ID NO: 2, 5, or 7.

[0021] In some embodiments, the at least one promoter comprises a T7 promoter, a T7GG promoter, a T7GGG promoter, an EF-1a promoter, a human pol I promoter, a CMV promoter, SP6, or a CMV/T7 dual promoter. In some embodiments, the promoter comprises a T7 promoter. In some embodiments, the promoter comprises a T7GG promoter. In some embodiments, the promoter comprises a CMV promoter. In some embodiments, the promoter comprises a CMV/T7 dual promoter.

[0022] In some embodiments, the terminator cassette comprises a polyA sequence, hepatitis D virus ribozyme sequence, and/or T7 terminator.

[0023] In some embodiments, the vector comprises SEQ ID NO: 2, 3, 4, 5, 6, 7, 13, 28, 29, 30, or 32, or a sequence that is 90%, 91%, 92%, 93%, 94%, 95%, 96%, 97%, 98%, or 99% homologous to SEQ ID NO: 2, 3, 4, 5, 6, 7, 13, 28, 29, 30, or 32. In some embodiments, the vector comprises SEQ ID NO: 2, or a sequence that is 90%, 91%, 92%, 93%, 94%, 95%, 96%, 97%, 98%, or 99% homologous to SEQ ID NO: 2. In some embodiments, the vector comprises SEQ ID NO: 3, or a sequence that is 90%, 91%, 92%, 93%, 94%, 95%, 96%, 97%, 98%, or 99% homologous to SEQ ID NO: 3. In some embodiments, the vector comprises SEQ ID NO: 4, or a sequence that is 90%, 91%, 92%, 93%, 94%, 95%, 96%, 97%, 98%, or 99% homologous to SEQ ID NO: 4. In some embodiments, the vector comprises SEQ ID NO: 5, or a sequence that is 90%, 91%, 92%, 93%, 94%, 95%, 96%, 97%, 98%, or 99% homologous to SEQ ID NO: 5. In some embodiments, the vector comprises SEQ ID NO: 6, or a sequence that is 90%, 91%, 92%, 93%, 94%, 95%, 96%, 97%, 98%, or 99% homologous to SEQ ID NO: 6. In some embodiments, the vector comprises SEQ ID NO: 7, or a sequence that is 90%, 91%, 92%, 93%, 94%, 95%, 96%, 97%, 98%, or 99% homologous to SEQ ID NO: 7. In some embodiments, the vector comprises SEQ ID NO: 13, or a sequence that is 90%, 91%, 92%, 93%, 94%, 95%, 96%, 97%, 98%, or 99% homologous to SEQ ID NO: 13. In some embodiments, the vector comprises SEQ ID NO: 28 or a sequence that is 90%, 91%, 92%, 93%, 94%, 95%, 96%, 97%, 98%, or 99% homologous to SEQ ID NO: 28. In some embodiments, the vector comprises SEQ ID NO: 29 or a sequence that is 90%, 91%, 92%, 93%, 94%, 95%, 96%, 97%, 98%, or 99% homologous to SEQ ID NO: 29. In some embodiments, the vector comprises SEQ ID NO: 30 or a sequence that is 90%, 91%, 92%, 93%, 94%, 95%, 96%, 97%, 98%, or 99% homologous to SEQ ID NO: 30. In some embodiments, the vector comprises SEQ ID NO: 32 or a sequence that is 90%, 91%, 92%, 93%, 94%, 95%, 96%, 97%, 98%, or 99% homologous to SEQ ID NO: 32.

[0024] The application also provides a cell line expressing the coronavirus reporter replicon of any one of the foregoing embodiments. In some embodiments, a cell line is transfected with a vector of any one of the foregoing embodiments. In some embodiments, a cell line transfected with an in vitro transcribed RNA of the coronavirus reporter replicon of any one of the foregoing embodiments. In some embodiments, the cell line is HEK 293T, Huh7.5, Calu-1, A549, or Vero. In some embodiments, the cell line is not Vero.

[0025] The application also provides a method of assaying a candidate agent for inhibition of coronavirus replication and/or translation comprising: providing the cell line of any one of the foregoing embodiments; combining the cell line with a candidate agent for inhibiting coronavirus; and determining whether the candidate agent decreases the expression and/or activity of the reporter gene.

[0026] In some embodiments of the foregoing method, the cell line comprises a coronavirus reporter replicon in an in vitro transcribed RNA. In some embodiments, the cell line comprises a coronavirus replicon expressed from a vector of any one of the foregoing embodiments. In some embodiments, the candidate agent inhibits coronavirus RNA replication.

[0027] In some embodiments of the foregoing methods, the assay does not require a BSL3 facility. In some embodiments, the assay may be conducted in a BSL2 facility.

[0028] Additional objects and advantages will be set forth in part in the description which follows, and in part will be obvious from the description, or may be learned by practice. The objects and advantages will be realized and attained by means of the elements and combinations particularly pointed out in the appended claims.

[0029] It is to be understood that both the foregoing general description and the following detailed description are exemplary and explanatory only and are not restrictive of the claims.

[0030] The accompanying drawings, which are incorporated in and constitute a part of this specification, illustrate at least one embodiment and together with the description, explain the principles described herein. The summary of the technology described above is non-limiting and other features and advantages of the technology will be apparent from the following detailed description, and from the claims.

### BRIEF DESCRIPTION OF THE DRAWINGS

[0031] FIGS. 1A-C show the construction and transcriptional analysis of a SARS-CoV-2 replicon. FIG. 1A shows a schematic diagram of reporter replicon genome structure, replication, and subgenomic (sg) mRNA production. The spike (S) and envelope/membrane (E/M) open reading frames (ORFs) in the wild type viral genome were deleted and replaced with a Luciferase-GFP fusion reporter (Luc-GFP) and Neo genes, respectively. The full-length replicon cDNA was flanked by a T7 promoter and a polyA/hepatitis D virus (HDV) ribozyme (RbZ) and T7 terminator cassette (polyA/RbZ/T7 terminator). The in vitro transcribed replicon RNA is copied by replicase complex (encoded by ORF1ab) to produce genomic or subgenomic sized negative stranded RNAs (dashed lines). The negative stranded sg RNAs are used as templates to produce the subgenomic (sg) mRNAs for expression of reporter and structural proteins. The sg mRNAs consist of the leader at 5′ (untranslated region) UTR of the genome and mRNA body sequences joined by a short, conserved sequence motif, the transcription-regulating sequence (TRS). The distribution of the TRS leader (TRS-L) and TRS body (TRS-B) are also indicated. FIG. 1B shows detection of the sg mRNA expressing Luc-GFP reporter protein. Total RNA was collected and purified at indicated times from human embryonic kidney (HEK) 293T cells (293T) electroporated with T7 polymerase transcribed replicon RNA. The mRNAs expressing Luc-GFP or β-actin were examined by RT-PCR. FIG. 1C shows GFP reporter signals produced by the wild type and RNA-dependent RNA polymerase (RdRp) mutant replicons. The A549, Calu-1, and Huh-7.5 cells were electroporated with T7 polymerase transcribed wild type replicon RNA or the RdRp D760N/D761N double mutant (negative control) replicon RNA and transferred to 384 well plates. The number of GFP positive cells in each well were counted at 30 h post electroporation.

[0032] FIGS. 2A-F show dose response curves of SARS-CoV-2 replicon reporter activity to GS-441524 and GC376. The 293T cells were electroporated with T7 polymerase transcribed replicon RNA and incubated with GS-441524 or GC376 at indicated concentrations. Percent GFP or luciferase activity reported in FIGS. 2A-D were determined by comparing GS-441524 or GC376-treated cells to DMSO-treated cells. FIGS. 2E-F show cytotoxicity of GS-441524 and GC376 to the cells.

[0033] FIG. 3 shows a schematic diagram of ORF1b and luc-GFP sequence in different Middle East respiratory syndrome (MERS) replicon constructs.

### DETAILED DESCRIPTION

### Description of Embodiments

### I. Coronavirus Replicon

[0034] Noninfectious coronavirus replicons provide increased safety and flexibility for investigators working to test candidate agents against coronaviruses, such as SARS-CoV-2, SARS-Cov-1, and Middle East Respiratory Syndrome (MERS). Replicons are self-replicating subgenomic systems in which genes encoding viral structural proteins are replaced by a reporter gene. By maintaining some genes of coronavirus, adding a reporter gene, and by creating a noninfectious variant due to deletion of at least one structural protein, investigators can use this replicon without needing BSL3 laboratories. This makes the ability to investigate candidate agents against coronavirus more accessible to a wider variety of investigators.

[0035] A coronavirus reporter replicon, such as a SARS-CoV-2, SARS-Cov-1, or MERS replicon comprises (a) one or more coronavirus (e.g. SARS-CoV-2, SARS-Cov-1, or MERS) genes encoding one or more coronavirus proteins for coronavirus viral RNA replication; and (b) at least one reporter gene. A coronavirus protein for viral RNA replication is a protein that if deleted, mutated, or inhibited, has the effect of reducing the viral RNA replication. The reporter replicon is replication competent, but is noninfectious. In some embodiments, the reporter replicon maintains all genes and genetic elements necessary for replicating full-length RNA and subgenomic RNAs.

[0036] The replicon may be a DNA molecule or an RNA molecule. While certain sequences are provided in this application in DNA or RNA form, a person of ordinary skill in the art can easily convert DNA sequences to RNA sequences and vice versa. Thus, the scope of the application and the scope of the claims embodies both DNA and RNA versions of the replicon, vectors, and other elements. In some embodiments, the replicon is a cDNA replicon made to facilitate mutagenesis and made by reverse transcribing single-stranded positive RNA from coronavirus (e.g. SARS-CoV-2, SARS-Cov-1, or MERS).

[0037] A. At Least One Coronavirus Gene Encoding a Coronavirus Protein

[0038] In some embodiments, the at least one coronavirus gene in the coronavirus reporter replicon (e.g. SARS-CoV-2, SARS-Cov-1, or MERS) encodes a target for a candidate antiviral agent. The replicon may comprise a single target or it may comprise multiple targets (i.e., it may include one or any combination of coronavirus proteins). In some embodiments, the target is at least one viral protein for coronavirus viral RNA replication (e.g. SARS-CoV-2, SARS-Cov-1, or MERS).

[0039] The SARS-CoV-2 viral RNA genome comprises open reading frame (ORF) 1a and ORF1ab, spike surface protein (S) ORF, ORF3a, envelope protein (E) ORF, membrane protein (M) ORF, ORF6, ORF7a, ORF7b, ORF8, nucleocapsid protein (N) ORF, ORF10, and 3′ UTR (Khailany, Rozhgar, A. et al. “Genomic characterization of a novel SARS-CoV-2.” Gene reports vol. 19 (2020): 100682. doi:10.1016/j.genrep.2020.100682, incorporated by reference herein). ORF1ab encodes for 16 non-structural proteins (nsp) of the replicase complex, i.e., nsp 1, 2, 3, 4, 5, 6, 7, 8, 9, 10, 11, 12, 13, 14, 15, and 16. ORF1a encodes nsp1-11 (Krichel et al. Biochem J. 2020 Mar. 13; 477(5): 1009-1019, incorporated by reference herein). S, E, M, and N ORFs encode for the structural proteins S, E, M, and N. ORFs 6, 7a, 7b, 8, and 10 encode for the accessory proteins (Romano, Maria et al. “A Structural View of SARS-CoV-2 RNA Replication Machinery: RNA Synthesis, Proofreading and Final Capping.” Cells vol. 9, 5 1267. 20 May. 2020, doi:10.3390/cells9051267; incorporated by reference herein).

[0040] The SARS-CoV-1 viral RNA genome comprises ORF1a and ORF1b, spike surface protein ORF, ORF3a, ORF3b, envelope protein (E) ORF, membrane protein (M) ORF, ORF6, ORF7a, ORF7b, ORF8a, ORF8b, nucleocapsid protein (N) ORF, OR9b and 3′ UTR (DeWit et al., “SARS and MERS: recent insights into emerging coronaviruses”, Nat Rev Microbiol. 2016 August; 14(8):523-34. doi: 10.1038/nrmicro.2016.81, incorporated by reference herein). ORF1a and ORF1b encode for 16 non-structural proteins (nsp) of the replicase complex, i.e., nsp 1, 2, 3, 4, 5, 6, 7, 8, 9, 10, 11, 12, 13, 14, 15, and 16. SARS-CoV-1 transcribes 12 subgenomic RNAs which encode the four structural proteins spike (S), envelope (E), membrane (M) and nucleocapsid (N), as well as several accessory proteins that are not involved in viral replication but either interfere with the host innate immune response or have unknown function.

[0041] The MERS viral RNA genome comprises ORF1a and ORF1b, spike surface protein ORF, ORF3, ORF4a, ORF4b, ORF5, envelope protein (E) ORF, membrane protein (M) ORF, nucleocapsid protein (N) ORF, and OR8b. (DeWit et al., “SARS and MERS: recent insights into emerging coronaviruses”, Nat Rev Microbiol. 2016 August; 14(8):523-34. doi: 10.1038/nrmicro.2016.81). ORF1a and ORF1b encode for 16 non-structural proteins (nsp) of the replicase complex, i.e., nsp 1, 2, 3, 4, 5, 6, 7, 8, 9, 10, 11, 12, 13, 14, 15, and 16. MERS transcribes 9 subgenomic RNAs which encode the four structural proteins spike (S), envelope (E), membrane (M) and nucleocapsid (N), as well as several accessory proteins that are not involved in viral replication but either interfere with the host innate immune response or have unknown function.

[0042] In some embodiments, the target for a candidate antiviral agent is an RNA-dependent RNA polymerase (RdRp). In some embodiments, RdRp is nsp12. In some embodiments, RdRp is SEQ ID NO: 9 (the wild-type RdRp). In some embodiments, RdRp may have at least one mutation compared to SEQ ID NO: 9 (the wild-type RdRp). In some embodiments, the RdRp may have a D760N mutation and/or a D761N mutation. In some embodiments, the RdRp is SEQ ID NO: 10 (the D760N RdRp mutant), 11(the D761N RdRp mutant), or 12 (the D760N/D761N RdRp mutant). In some embodiments RdRP is SEQ ID NO: 34 (RdRp from MERS). In some embodiments, RdRp is SEQ ID NO: 35 (RdRp from SARS-CoV-1).

[0043] In some embodiments, the target for a candidate antiviral agent is a protease. In some embodiments, the protease is nsp5. In some embodiments, the protease is M^{por} or 3CL^{pro}.

[0044] In some embodiments, the coronavirus reporter replicon further comprises a nucleocapsid ORF.

[0045] In some embodiments, the coronavirus reporter replicon comprises a replicase complex ORF1ab, a reporter gene, a selection gene, and a nucleocapsid gene.

[0046] In some embodiments, the coronavirus reporter replicon comprises SEQ ID NO: 2 (the T7-scv2-luc-GFP replicon). In some embodiments, the coronavirus reporter replicon comprises SEQ ID NO: 5 (the T7-scv2-nanoluc replicon). In some embodiments, the coronavirus reporter replicon comprises SEQ ID NO: 7 (the T7GG-scv2-nanoluc replicon).

[0047] In some embodiments, the coronavirus reporter replicon comprises SEQ ID NO: 28 (the T7-mcv-replicon1). In some embodiments, the coronavirus reporter replicon comprises SEQ ID NO: 29 (the T7-mcv-replicon2). In some embodiments, the coronavirus reporter replicon comprises SEQ ID NO: 30 (the T7-mcv-replicon3).

[0048] In some embodiments, the coronavirus reporter replicon comprises SEQ ID NO: 32 (the T7-scv1-luc-GFP replicon). In some embodiments, the coronavirus reporter replicon comprises SEQ ID NO: 33 (the T7-scv1-luc-GFP replicon).

[0049] In some embodiments, the coronavirus reporter replicon may have sequences for TRS-L and/or TRS-B. In some embodiments, the coronavirus reporter replicon further comprises ORF3a, ORF6, ORF7a, ORF7b, ORF8, and/or inter ORF10.

[0050] In some embodiments, the coronavirus reporter replicon does not comprise at least one functional coronavirus ORF or functional ORF from any virus. The coronavirus ORF or viral ORF missing from the coronavirus reporter replicon may be a spike ORF, an envelope ORF, or a membrane ORF, whether from SARS-CoV-2, SARS-CoV-1, MERS, or from any other virus. In some embodiments, the coronavirus reporter replicon does not comprise at least one of a functional coronavirus spike ORF, envelope ORF, or membrane ORF. In some embodiments, the coronavirus reporter replicon does not comprise a functional coronavirus spike ORF. In some embodiments, the coronavirus reporter replicon does not comprise a functional coronavirus envelope ORF. In some embodiments, the coronavirus reporter replicon does not comprise a functional coronavirus membrane ORF. In some embodiments, the coronavirus reporter replicon does not comprise at least one of functional spike ORF, envelope ORF, or membrane ORF. In some embodiments, the coronavirus reporter replicon does not comprise a functional spike ORF. In some embodiments, the coronavirus reporter replicon does not comprise a functional envelope ORF. In some embodiments, the coronavirus reporter replicon does not comprise a functional membrane ORF. In some embodiments, the coronavirus reporter replicon does not comprise a functional spike ORF, envelope ORF, or membrane ORF.

[0051] B. At Least One Reporter Gene

[0052] Adding a reporter gene to the replicon facilitates the ease of evaluating whether a candidate agent inhibits the coronavirus replicon and whether the candidate agent should be considered for further preclinical and clinical trials for treatment of coronavirus infection (e.g. SARS-CoV-2, SARS-CoV-1, or MERS).

[0053] In some embodiments, at least one reporter gene is a bioluminescent reporter gene, a fluorescent protein gene, and/or an enzymatic reporter gene. In some embodiments, the at least one reporter gene is a gene for firefly luciferase (Luc), Renilla luciferase (RLuc), NanoLuc® Luciferase Nluc, NanoLuc® Luciferase NlucP, NanoLuc® Luciferase secNluc, and/or Gaussia luciferase (GLuc). In some embodiments, the at least one reporter gene comprises firefly luciferase. In some embodiments, the at least one reporter gene is a gene for green fluorescent protein (GFP), enhanced GFP (eGFP), red fluorescent protein (RFP), mCherry, and/or Discosoma Red (DsRed). In some embodiments, the at least one reporter gene comprises GFP. In some embodiments, the at least one reporter gene is a gene for β-lactamase, β-galactosidase, and/or secreted alkaline phosphatase (SAP). In some embodiments, the at least one reporter gene comprises a fusion gene of two or more reporter genes. In some embodiments, the at least one reporter gene is a fusion gene of firefly luciferase and GFP.

[0054] C. A Selection Gene

[0055] In some embodiments, the coronavirus reporter replicon comprises a selection gene. A selection gene may comprise an antibiotic resistance gene. In some embodiments, the selection gene imparts resistance to neomycin, puromycin, blasticidin, Geneticin® (G418 sulfate), Zeocin™, and/or hygromycin B. The selection gene may be neomycin phosphotransferase gene, puromycin N-acetyltransferase gene, blasticidin-S resistance gene (bsr), blasticidin-S deaminase (bsd), blasticidin-S acetyltransferase gene (bls), bleomycin resistance gene (Sh ble), and/or hygromycin B phosphotransferase gene (hph).

### II. Vector Comprising the Coronavirus Reporter Replicon

[0056] A vector may comprise a replication competent, noninfectious coronavirus reporter replicon of the present disclosure, as described in Section I above. As discussed above, the reporter and replicon may be in DNA or RNA format. In some embodiments, the vector may include at least one promoter and/or a terminator cassette. In some embodiments, the vector is a circular nucleic acid molecule, such as a plasmid.

[0057] A variety of expression vectors can be used to express a nucleic acid molecule. Such vectors include chromosomal, episomal, and virus-derived vectors, e.g., vectors derived from bacterial plasmids, from bacteriophage, from yeast episomes, from yeast chromosomal elements, including yeast artificial chromosomes (YAC), from viruses such as baculoviruses, papovaviruses such as SV40, vaccinia viruses, adenoviruses, poxviruses, pseudorabies viruses, herpes viruses, and retroviruses. Vectors may also be derived from combinations of these sources, such as those derived from plasmid and bacteriophage genetic elements, e.g., cosmids and phagemids. In some embodiments, the vector is a bacterial artificial chromosome (BAC).

[0058] A. Promoter

[0059] In some embodiments, the vector comprising the coronavirus reporter replicon contains at least one promoter. A promoter can be situated at the 5′ end of an ORF. In some embodiments, the promoter is a T7 promoter, a T7GG promoter, a T7GGG promoter, an EF-1a promoter, a human pol I promoter, a CMV promoter, SP6, T3 promoter, and/or a CMV/T7 dual promoter. In some embodiments, the promoter is a T7 promoter. In some embodiments, the promoter is a T7GG promoter. In some embodiments, the promoter is a CMV promoter. In some embodiments, the promoter is a CMV/T7 dual promoter.

[0060] B. Terminator Cassette

[0061] In some embodiments, the vector comprising the coronavirus reporter replicon contains a terminator cassette. A terminator cassette can be situated at the 3′ end of an ORF. In some embodiments, the terminator cassette is a T7 terminator cassette.

[0062] In some embodiments, the vector comprising the coronavirus reporter replicon may have a polyA sequence and/or a virus ribozyme (RbZ) sequence, in addition to a terminator cassette. In some embodiments, the polyA sequence and/or RbZ sequence are a part of the T7 terminator (T7T) cassette, i.e., polyA/RbZ/T7 terminator. In some embodiments, the virus RbZ sequence is a hepatitis virus RbZ sequence. In some embodiments, the hepatitis virus is a hepatitis B virus (HBV) or a hepatitis D virus (HDV). In some embodiments, the vector comprising the coronavirus reporter replicon contains a polyA sequence and an HDV RbZ sequence.

[0063] C. Vector Sequences Comprising the SARS-CoV-2 Reporter Replicon

[0064] In some embodiments, the vector comprises a non-mammalian promoter and a coronavirus reporter replicon. In some embodiments, the vector is a BAC vector. In some embodiments, the vector comprises a T7 promoter and a coronavirus reporter replicon. In some embodiments, the vector comprises SEQ ID NO: 2 (the T7-scv2-luc-GFP replicon) or a sequence that is 90%, 91%, 92%, 93%, 94%, 95%, 96%, 97%, 98%, or 99% homologous to SEQ ID NO: 2 (the T7-scv2-luc-GFP replicon). In some embodiments, the vector comprises SEQ ID NO: 28 (the T7-mcv-replicon1) or a sequence that is 90%, 91%, 92%, 93%, 94%, 95%, 96%, 97%, 98%, or 99% homologous to SEQ ID NO: 28. In some embodiments, the vector comprises SEQ ID NO: 29 (the T7-mcv-replicon2) or a sequence that is 90%, 91%, 92%, 93%, 94%, 95%, 96%, 97%, 98%, or 99% homologous to SEQ ID NO: 29. In some embodiments, the vector comprises SEQ ID NO: 30 (the T7-mcv-replicon3) or a sequence that is 90%, 91%, 92%, 93%, 94%, 95%, 96%, 97%, 98%, or 99% homologous to SEQ ID NO: 30. In some embodiments, the vector comprises SEQ ID NO: 32 (the T7-scv1-luc-GFP replicon) or a sequence that is 90%, 91%, 92%, 93%, 94%, 95%, 96%, 97%, 98%, or 99% homologous to SEQ ID NO: 32. In some embodiments, the vector comprises SEQ ID NO: 33 (the T7-scv1-luc-GFP replicon) or a sequence that is 90%, 91%, 92%, 93%, 94%, 95%, 96%, 97%, 98%, or 99% homologous to SEQ ID NO: 33.

[0065] In some embodiments, the vector comprises a T7 promoter, a SARS-CoV-2 reporter replicon, a polyA/RbZ/T7 terminator and a pSMART BAC vector backbone. In some embodiments, the pSMART BAC vector backbone comprises a second promoter. In some of these embodiments, the vector then comprises a dual promoter. In some embodiments, the vector comprises a CMV/T7 dual promoter.

[0066] In some embodiments, the vector is a T7-scv2-luc-GFP replicon (i.e., SEQ ID NO: 2) in a pSMART BAC vector with a CMV promoter. In some embodiments, the vector comprises SEQ ID NO: 3 (the pSMART BAC vector with the CMV-T7-scv2-luc-GFP replicon) or a sequence that is 90%, 91%, 92%, 93%, 94%, 95%, 96%, 97%, 98%, or 99% homologous to SEQ ID NO: 3 (the pSMART BAC vector with the CMV-T7-scv2-luc-GFP replicon). In some embodiments, the vector comprises SEQ ID NO: 28 (the T7-mcv-replicon1) with a CMV promoter. In some embodiments, the vector comprises SEQ ID NO: 29 (the T7-mcv-replicon2) with a CMV promoter. In some embodiments, the coronavirus reporter replicon comprises SEQ ID NO: 30 (the T7-mcv-replicon3) with a CMV promoter. In some embodiments, the vector comprises SEQ ID NO: 32 (the T7-scv1-luc-GFP replicon) with a CMV promoter. In some embodiments, the vector comprises SEQ ID NO: 33 (the T7-scv1-luc-GFP replicon) with a CMV promoter.

[0067] In some embodiments, the vector is a T7-scv2-luc-GFP replicon (i.e., SEQ ID NO: 2) in a pSMART BAC vector without a CMV promoter. In some embodiments, the vector comprises SEQ ID NO: 13 (the pSMART BAC vector with the T7-scv2-luc-GFP replicon) or a sequence that is 90%, 91%, 92%, 93%, 94%, 95%, 96%, 97%, 98%, or 99% homologous to SEQ ID NO: 13 (the pSMART BAC vector with the T7-scv2-luc-GFP replicon). In some embodiments, the vector comprises SEQ ID NO: 28 (the T7-mcv-replicon1) in a pSMART BAC vector without a CMV promoter. In some embodiments, the vector comprises SEQ ID NO: 29 (the T7-mcv-replicon2) in a pSMART BAC vector without a CMV promoter. In some embodiments, the coronavirus reporter replicon comprises SEQ ID NO: 30 (the T7-mcv-replicon3) in a pSMART BAC vector without a CMV promoter. In some embodiments, the vector comprises SEQ ID NO: 32 (the T7-scv1-luc-GFP replicon) in a pSMART BAC vector without a CMV promoter. In some embodiments, the vector comprises SEQ ID NO: 33 (the T7-scv1-luc-GFP replicon) in a pSMART BAC vector without a CMV promoter.

[0068] In some embodiments, the vector comprises a T7GG promoter and a coronavirus reporter replicon. In some embodiments, the vector comprises SEQ ID NO: 4 (the pSMART BAC vector with the T7GG-scv2-GFP-luc replicon) or a sequence that is 90%, 91%, 92%, 93%, 94%, 95%, 96%, 97%, 98%, or 99% homologous to SEQ ID NO: 4 (the pSMART BAC vector with the T7GG-scv2-GFP-luc replicon). In some embodiments, the vector comprises SEQ ID NO: 28 (the T7-mcv-replicon1) in a pSMART BAC vector without a CMV promoter. In some embodiments, the vector comprises SEQ ID NO: 29 (the T7-mcv-replicon2) in a pSMART BAC vector without a CMV promoter. In some embodiments, the coronavirus reporter replicon comprises SEQ ID NO: 30 (the T7-mcv-replicon3) in a pSMART BAC vector without a CMV promoter. In some embodiments, the vector comprises SEQ ID NO: 32 (the T7-scv1-luc-GFP replicon) in a pSMART BAC vector without a CMV promoter. In some embodiments, the vector comprises SEQ ID NO: 33 (the T7-scv1-luc-GFP replicon) in a pSMART BAC vector without a CMV promoter.

[0069] In some embodiments, the vector comprises a coronavirus reporter replicon with nanoluciferase reporter gene. In some embodiments, the vector comprises SEQ ID NO: 6 (the pSMART BAC with the CMV-T7-scv2-nanoluc replicon) or a sequence that is 90%, 91%, 92%, 93%, 94%, 95%, 96%, 97%, 98%, or 99% homologous to SEQ ID NO: 6 (the pSMART BAC with the CMV-T7-scv2-nanoluc replicon).

[0070] In some embodiments, the coronavirus reporter replicon comprises SEQ ID NO: 28 (the T7-mcv-replicon1). In some embodiments, the coronavirus reporter replicon comprises SEQ ID NO: 29 (the T7-mcv-replicon2). In some embodiments, the coronavirus reporter replicon comprises SEQ ID NO: 30 (the T7-mcv-replicon3).

[0071] In some embodiments, the coronavirus reporter replicon comprises SEQ ID NO: 32 (the T7-scv1-luc-GFP replicon). In some embodiments, the coronavirus reporter replicon comprises SEQ ID NO: 33 (the T7-scv1-luc-GFP replicon).

[0072] In some embodiments, the vector does not comprise a gene for the RdRp double mutant D760N/D761N.

[0073] D. RNA and DNA Vectors

[0074] In some embodiments, the vector is a DNA vector. In some embodiments, the vector is an RNA vector. In situations where the replicon is an DNA replicon, it may be transcribed and inserted into an RNA vector. More specifically, in some embodiments, the coronavirus reporter replicon RNA is prepared using in vitro transcription. In some embodiments, the coronavirus reporter replicon RNA is transcribed from a linearized vector. In some embodiments, the RNA is transcribed from a SARS-CoV-2 reporter DNA replicon of SEQ ID NO: 2 (the T7-scv2-luc-GFP replicon), 4 (the T7GG-scv2-luc-GFP replicon), 5 (the T7-scv2-nanoluc replicon), or 7 (the T7GG-scv2-nanoluc replicon). In some embodiments, the RNA is transcribed from a linearized vector of SEQ ID NO: 3 (the pSMART BAC vector with the CMV-T7-scv2-luc-GFP replicon). In some embodiments, the RNA is transcribed from a linearized vector of SEQ ID NO: 4 (the pSMART BAC vector with the T7GG-scv2-GFP-luc replicon). In some embodiments, the RNA is transcribed from a linearized vector of SEQ ID NO: 6 (the pSMART BAC vector with the CMV-T7-scv2-nanoluc replicon). In some embodiments, the RNA is transcribed from a linearized vector of SEQ ID NO: 13 (the pSMART BAC vector with the T7-scv2-luc-GFP replicon). In some embodiments, the RNA is transcribed from a linearized vector of SEQ ID NO: 28 (the T7-mcv-replicon1). In some embodiments, the RNA is transcribed from a linearized vector of SEQ ID NO: 29 (the T7-mcv-replicon2). In some embodiments, the RNA is transcribed from a linearized vector of SEQ ID NO: 30 (the T7-mcv-replicon3). In some embodiments, the RNA is transcribed from a linearized vector of SEQ ID NO: 32 (the T7-scv1-luc-GFP replicon). In some embodiments, the RNA is transcribed from a linearized vector of SEQ ID NO: 33 (the T7-scv1-luc-GFP replicon).

### III. Cell Lines

[0075] Many cell lines (i.e., host cell lines) can be used to express the coronavirus reporter replicon. Many cell lines and related methods may be used to support challenges in developing antivirals capable of protecting a broad range of host cells, such as different transfection efficiencies and candidate antiviral potencies. In some embodiments, the cell line is a mammalian cell line. In some embodiments, the cell line is human embryonic kidney (HEK) 293T (293T), Huh7.5, Calu-1, A549, or Vero. In some embodiments, the cell line is not Vero.

[0076] In some embodiments, host cells can include bacterial cells including, but not limited to, E. coli, Streptomyces, and Salmonella typhimurium, eukaryotic cells including, but not limited to, yeast, insect cells, such as Drosophila, animal cells, such as Huh-7, HeLa, COS, HEK 293, HEK 293T, MT-2T, CEM-SS, and CHO cells, and plant cells.

[0077] Many methods may be used to transfect cells with a coronavirus reporter replicon. In some embodiments, transfection is achieved by electroporation, lipotransfection, microinjection, gene gun, impalefection, hydrostatic pressure, continuous infusion, sonication, polymeric gene carriers, or other methods.

[0078] After transfection of cells with a coronavirus reporter replicon, replicon mRNA production in cells may be confirmed by RT-PCR. Primers may be generated using standard primer generation tools. In some embodiments, the reporter gene (such as Luc-GFP sg mRNA) may be detected by RT-PCR using a forward primer in the leader sequence of the 5′ UTR and a reverse primer in the reporter (for example, Luc-GFP) coding region. In some embodiments, the reporter gene (such as Luc-GFP sg mRNA) is detected after at least 12 h post transfection. In some embodiments, the presence of the reporter gene (such as Luc-GFP sg) mRNA is indicated by the detection of the reporter signal (in one embodiment, GFP fluorescence) in the cell. In some embodiments, the presence of the reporter gene (for example, Luc-GFP sg mRNA) is indicated by the detection of reporter activity (for example, luciferase activity). Other primers, other reporter signals, and other reporter genes may be used as described herein.

[0079] In some embodiments, a cell line is transfected with a vector comprising a coronavirus reporter DNA replicon. In some embodiments, the vector comprises SEQ ID NO: 2 (the T7-scv2-luc-GFP replicon), SEQ ID NO: 3 (the pSMART BAC vector with the CMV-T7-scv2-luc-GFP replicon), SEQ ID NO: 4 (the pSMART BAC vector with the T7GG-scv2-luc-GFP replicon), SEQ ID NO: 5 (the T7-scv2-nanoluc replicon), SEQ ID NO: 6 (the pSMART BAC vector with the CMV-T7-scv2-nanoluc replicon), SEQ ID NO: 7 (the T7GG-scv2-nanoluc replicon), or SEQ ID NO: 13 (the pSMART BAC vector with the T7-scv2-luc-GFP replicon), or a sequence that is 90%, 91%, 92%, 93%, 94%, 95%, 96%, 97%, 98%, or 99% homologous to any of those sequences. In some embodiments, a cell line is transfected with a vector of SEQ ID NO: 3 (the pSMART BAC vector with the CMV-T7-scv2-luc-GFP replicon). In some embodiments, a cell line is transfected with a vector of SEQ ID NO: 4 (the pSMART BAC with the T7GG-scv2-luc-GFP replicon). In some embodiments, a cell line is transfected with a vector of SEQ ID NO: 6 (the pSMART BAC vector with the CMV-T7-scv2-nanoluc replicon). In some embodiments, a cell line is transfected with a vector of SEQ ID NO: 13 (the pSMART BAC vector with the T7-scv2-luc-GFP replicon). In some embodiments, the vector comprises SEQ ID NO: 28 (the T7-mcv-replicon1) or a sequence that is 90%, 91%, 92%, 93%, 94%, 95%, 96%, 97%, 98%, or 99% homologous to SEQ ID NO: 28. In some embodiments, the vector comprises SEQ ID NO: 29 (the T7-mcv-replicon2) or a sequence that is 90%, 91%, 92%, 93%, 94%, 95%, 96%, 97%, 98%, or 99% homologous to SEQ ID NO: 29. In some embodiments, the vector comprises SEQ ID NO: 30 (the T7-mcv-replicon3) or a sequence that is 90%, 91%, 92%, 93%, 94%, 95%, 96%, 97%, 98%, or 99% homologous to SEQ ID NO: 30. In some embodiments, the vector comprises SEQ ID NO: 32 (the T7-scv1-luc-GFP replicon) or a sequence that is 90%, 91%, 92%, 93%, 94%, 95%, 96%, 97%, 98%, or 99% homologous to SEQ ID NO: 32. In some embodiments, the vector comprises SEQ ID NO: 33 (the T7-scv1-luc-GFP replicon) or a sequence that is 90%, 91%, 92%, 93%, 94%, 95%, 96%, 97%, 98%, or 99% homologous to SEQ ID NO: 33.

[0080] In some embodiments, a cell line is transfected with an in vitro transcribed RNA of the SARS-CoV-2 reporter replicon. In some embodiments, the in vitro transcribed RNA is the full-length replicon RNA. In some embodiments, the in vitro transcribed RNA comprises an RNA equivalent of a DNA sequence comprising SEQ ID NO: 2 (the T7-scv2-luc-GFP replicon), SEQ ID NO: 3 (the pSMART BAC vector with the CMV-T7-scv2-luc-GFP replicon), SEQ ID NO: 4 (the pSMART BAC with the T7GG-scv2-luc-GFP replicon), SEQ ID NO: 5 (the T7-scv2-nanoluc replicon), SEQ ID NO: 6 (the pSMART BAC vector with the CMV-T7-scv2-nanoluc replicon), SEQ ID NO: 7 (the T7GG-scv2-nanoluc replicon), SEQ ID NO: 13 (the pSMART BAC vector with the T7-scv2-luc-GFP replicon), SEQ ID NO: 28 (the T7-mcv-replicon1), SEQ ID NO: 29 (the T7-mcv-replicon2), SEQ ID NO: 30 (the T7-mcv-replicon3), SEQ ID NO: 32 (the T7-scv1-luc-GFP replicon), or SEQ ID NO: 33 (the T7-scv1-luc-GFP replicon) or a sequence that is 90%, 91%, 92%, 93%, 94%, 95%, 96%, 97%, 98%, or 99% homologous to any of those sequences.

[0081] In some embodiments, a cell line is transfected with an RNA replicon with the RNA equivalent of a DNA sequence comprising SEQ ID NO: 2 (the T7-scv2-luc-GFP replicon), SEQ ID NO: 3 (the pSMART BAC vector with the CMV-T7-scv2-luc-GFP replicon), SEQ ID NO: 4 (the pSMART BAC vector with the T7GG-scv2-luc-GFP replicon), SEQ ID NO: 5 (the T7-scv2-nanoluc replicon), SEQ ID NO: 6 (the pSMART BAC vector with the CMV-T7-scv2-nanoluc replicon), SEQ ID NO: 7 (the T7GG-scv2-nanoluc replicon), SEQ ID NO: 13 (the pSMART BAC vector with the T7-scv2-luc-GFP replicon), SEQ ID NO: 28 (the T7-mcv-replicon1), SEQ ID NO: 29 (the T7-mcv-replicon2), SEQ ID NO: 30 (the T7-mcv-replicon3), SEQ ID NO: 32 (the T7-scv1-luc-GFP replicon), or SEQ ID NO: 33 (the T7-scv1-luc-GFP replicon) or a sequence that is 90%, 91%, 92%, 93%, 94%, 95%, 96%, 97%, 98%, or 99% homologous to any of those sequences.

### IV. Methods of Assaying Candidate Agents

[0082] In many embodiments, a method of assaying a candidate agent for inhibition of coronavirus replication and/or translation comprises (a) providing the cell line transfected with a coronavirus reporter replicon; (b) combining the cell line with a candidate agent for inhibiting coronavirus; and (c) determining whether the candidate agent decreases the expression and/or activity of the reporter gene. A wide variety of candidate agents may be tested that are potentially capable of inhibiting one or more of the genes or proteins present in the coronavirus reporter replicon.

[0083] Inhibitors of viral replication and/or translation may decrease the expression and activity of the replicon reporter protein. In many embodiments, a high throughput screen is used to identify candidate agents as inhibitors against coronavirus or any virus, wherein the screen is carried out using microplates and robotic liquid dispensers. Candidate agents and cells that were transfected with reporter replicon are incubated for a certain period of time before the candidate agents are evaluated for antiviral activity, depending on the agent selected and the growth rate of the cells chosen for the assay. In many embodiments, candidate agents are evaluated for antiviral activity after at least 24 h of incubation. In some embodiments, the candidate agents are evaluated after at least 30 h of incubation.

[0084] In many embodiments, the microplates are 96-well plates, 384-well plates, or 1536-well plates. In many embodiments, the microplates are poly-D lysine-coated plates or cell culture-treated, flat-bottom microplates.

[0085] In some embodiments, candidate agents and controls are added to the microplate first, and the cells are added second. In some embodiments, the cells are added to the microplate first, and the candidate agents and controls are added second. The agents and the cells may also be added simultaneously.

[0086] In many embodiments, each candidate agent is tested in serial dilution, such as a 10-point serial 3-fold dilution. In some embodiments, a suitable vehicle may be used as a negative control, wherein the vehicle is a solution that solubilizes the candidate agent. In some embodiments, DMSO may be used as a negative control. In some embodiments, a known antiviral compound that does not inhibit viral RNA synthesis and/or protein translation may be used as a negative control. In some embodiments, the known antiviral compound may inhibit host cell entry or endosome entry. In some of these embodiments, nafamostat (nafamostat mesylate; nafamostate mesilate; Fusan), camostat (camostat mesylate; camostate mesylate; Foipan), apilimod (STA-5326), and/or relacatib (462795; GSK-462795; SB-462795) may be used as a negative control. In some embodiments, a known antiviral compound may be used as a positive control. In some embodiments, remdesivir may be used as a positive control. In some embodiments, GS-441524 may be used as a positive control.

[0087] In many embodiments, the cells are transfected with a reporter replicon before being added to the wells. In many embodiments, the cells may be transfected with a SARS-CoV-2 reporter replicon of the present disclosure or a reporter replicon of any virus. Reporter replicon transfection may be carried out according to established tools and methods known to a practitioner of ordinary skill, such as the MaxCyte Flow Electroporation® technology. In many embodiments, the cells are added to the microplate after transfection with a reporter replicon.

[0088] Depending on a variety of parameters, such as the type of microplate and the type of cells being used, a predetermined number of cells is added into each well in a plate. In some embodiments, 20,000 transfected cells are added to each well. Depending on the cell line being used, specific culture conditions may be used to incubate cells with the candidate agents. In some embodiments, the incubation conditions are 37° C., 5% CO₂, and 90% relative humidity.

[0089] Antiviral activity is determined by reduction in the number of GFP positive cells or luciferase activity (or other reporter signal) in the cells treated with candidate agent when compared to those of vehicle-treated (negative control) cells. In many embodiments, antiviral activity comprises inhibition of SARS-CoV-2 replication and/or translation. A variety of methods can be used to assess the candidate agents for antiviral activity. In some embodiments, the cells are analyzed for GFP fluorescence (or other reporter signal). In some of these embodiments, a microplate cytometer such as an Acumen® eX3 fluorescence microplate cytometer may be used for GFP analysis. In other embodiments, the cells are analyzed for luciferase activity. In some of these embodiments, plate reader such as an EnVision® multimode plate reader may be used for luciferase analysis.

[0090] In many embodiments, EC50 is determined for candidate agents, wherein the EC50 is the concentration of the candidate agent that provides response that is halfway between the baseline and the maximum response. In many embodiments, the baseline is provided by cells treated with a vehicle, such as DMSO. In many embodiments, the maximum response is provided by cells treated with a positive control, such as remdesivir or GS-441524. In many embodiments, EC50 was determined by using a non-linear 4-parameter curve fitting model in ActivityBase.

[0091] Candidate agents are also evaluated using cytotoxicity assays which measure loss of some cellular or intercellular structure and/or function, including lethal cytotoxicity. Candidate agents may adversely affect cell health and interfere indirectly with the activity of the replicon reporter protein, producing false-positive hits in the antiviral screen. Thus, candidate agents are evaluated for cytotoxicity in parallel with inhibition of coronavirus replication and/or translation. In many embodiments, cytotoxicity methods may comprise enzyme leakage assays, membrane impermeable dyes, and/or amine-reactive dyes.

[0092] In some embodiments, the candidate agent inhibits coronavirus protein translation and/or RNA replication. In some embodiments, the candidate agent is an RNA-dependent RNA polymerase inhibitor or a main protease inhibitor or a main protease inhibitor. In some embodiments, the candidate agent is the main protease inhibitor PF-00835231, GC376, or Z-LVG-DMF.

[0093] A. Targets for Candidate Agents

[0094] A candidate agent may target a protein expressed from a coronavirus gene (e.g. a SARS-CoV-2 gene, a SARS-CoV-1 gene, or a MERS gene). Alternatively, a candidate agent may target any of a plurality of nucleic acid sequences associated with coronavirus.

[0095] In order to test candidate antiviral agents, the coronavirus reporter replicon may comprise at least one nucleic acid sequence that is a target for at least one agent. Upon cell entry, the coronavirus genomic RNA is replicated for genome synthesis or transcribed and translated to produce proteins from open reading frames (ORFs).

[0096] In some embodiments, the at least one target for at least one agent is an RNA sequence chosen from coronavirus genomic RNA, full-length mRNA, or subgenomic (sg) mRNA. In many embodiments, the genomic RNA, full-length mRNA, or subgenomic (sg) mRNA is transcribed from a coronavirus reporter replicon. In many embodiments, the transcription of genomic RNA, full-length mRNA, or subgenomic (sg) mRNA can take place in vitro or within a host cell.

[0097] In some embodiments, the at least one target for at least one agent is a DNA sequence. In some embodiments, the DNA sequence is produced by reverse transcription of a coronavirus genomic RNA, full-length mRNA, or sg mRNA. In some embodiments, the DNA sequence is a cDNA sequence. In many embodiments, the coronavirus reporter replicon comprises a cDNA sequence.

V. Noninfectious Coronavirus Replicons that Provide Biological Safety

[0098] Biological Safety Levels are a series of protections designed to protect laboratory personnel as well as the surrounding environment and community. A BSL3 laboratory typically includes work on microbes that are either indigenous or exotic, and can cause serious or potentially lethal disease through inhalation. The SARS-CoV-2, SARS-CoV-1, and MERS viruses are examples of a microbe that requires a Biological Safety Level 3 (BSL3) laboratory. The quest for rapid identification of new drugs against SARS-CoV-2 and other coronaviruses is hampered by the lack of a robust and high throughput antiviral assay that can be performed without BSL3 restrictions.

[0099] The present disclosure provides noninfectious coronavirus replicons and related methods that do not require a BSL3 laboratory. In some embodiments, the method of assaying candidate agents for inhibition of coronavirus replication and/or translation does not require a BSL3 facility. In some embodiments, the replicon may be used in a BSL2 facility.

### Definitions

[0100] Listed below are definitions of various terms used herein. These definitions apply to the terms as they are used throughout this specification and claims, unless otherwise limited in specific instances, either individually or as part of a larger group.

[0101] Unless defined otherwise, all technical and scientific terms used herein have the same meaning as commonly understood by one of ordinary skill in the art. Generally, the nomenclature used herein and the laboratory procedures in cell culture, molecular genetics, organic chemistry, and peptide chemistry are those well-known and commonly employed in the art.

[0102] As used herein, the term “about” in quantitative terms refers to plus or minus 10% of the value it modifies (rounded up to the nearest whole number if the value is not sub-dividable, such as a number of molecules or nucleotides).

[0103] The term “candidate antiviral agent,” refers to any compound that may possess antiviral activity.

[0104] A “coding sequence” or “open reading frame” is a nucleotide sequence that is transcribed and translated into a polypeptide in vivo when placed under the control of appropriate regulatory sequences. The boundaries of the coding sequence are determined by a start codon at the 5′ (amino) terminus and a translation stop codon at the 3′ (carboxyl) terminus.

[0105] The term “fluorescent protein” refers to a protein that emits light at some wavelength after excitation by light at another wavelength. Exemplary fluorescent proteins that emit in the green spectrum range include, but are not limited to: green fluorescent protein (GFP); enhanced GFP (eGFP); superfolder GFP; AcGFP1; and ZsGreen1. Exemplary fluorescent proteins that emit light in the blue spectrum range include, but are not limited to: enhanced blue fluorescent protein (EBFP), EBFP2, Azurite, and mKalama. Exemplary fluorescent proteins that emit light in the cyan spectrum range include, but are not limited to: cyan fluorescent protein (CFP); enhanced CFP (ECFP); Cerulean; mHoneydew; and CyPet. Exemplary fluorescent proteins that emit light in the yellow spectrum range include, but are not limited to: yellow fluorescent protein (YFP); Citrine; Venus; mBanana; ZsYellow 1; and Ypet. Exemplary fluorescent proteins that emit in the orange spectrum range include, but are not limited to: mOrange; tdTomato; Exemplary fluorescent proteins that emit light in the red and far-red spectrum range include, but are not limited to: DsRed; DsRed-monomer; DsRed-Express2; mRFPi; mCherry; mStrawberry; mRaspberry; niPluni; E2-Crimson; iRFP670; iRFP682; iRFP702; iRFP720. Exemplary listings of fluorescent proteins and their characteristics may be found in Day and Davidson, Chem Soc Rev 2009 October; 38(10): 2887-2921, incorporated herein by reference.

[0106] Fluorescent proteins may include chimeric combinations of fluorescent proteins that transfer and receive energy through fluorescent resonance energy transfer (FRET) when exposed to a particular wavelength of light. In some embodiments, an acceptor in a FRET pair may emit light at a certain wavelength after accepting energy from a donor molecule exposed to another wavelength of light. Exemplary chimeric FRET pairs, include, but are not limited to ECFP-EYFP; mTurquoise2-SeYFP; EGFP-mCherry; and Clover-mRuby. In some embodiments, the acceptor molecule of chimeric fluorescent molecule may quench the light emission of a donor molecule exposed to its preferred wavelength of light. Quenching between different portions of chimeric fluorescent proteins may occur using a photoactivatable acceptor. For example, a chimeric fluorescent protein may include a photoactivatable GFP that can then quench photoemission by CFP. Examples of FRET proteins are discussed in Ehldebrandt et al., Sensors (Basel). 2016 September; 16(9): 1488, incorporated herein by reference.

[0107] The term “functional” in reference to an ORF means that the ORF is capable of encoding the referenced protein, e.g., a “functional” SARS-CoV-2 spike ORF is capable of encoding the SARS-CoV-2 spike protein.

[0108] The term “noninfectious,” refers to the inability of viral components to be transmitted from organism to organism, from cell to cell, or from cell to organism.

[0109] The term “nucleic acid” molecule generally refers to any polyribonucleotide or polydeoxribonucleotide, which may be unmodified RNA or DNA or modified RNA or DNA. “Nucleic acids” include, without limitation single- and double-stranded DNA, DNA that is a mixture of single- and double-stranded regions, single- and double-stranded RNA, and RNA that is mixture of single- and double-stranded regions, hybrid molecules comprising DNA and RNA that may be single-stranded or, more typically, double-stranded or a mixture of single- and double-stranded regions. In addition, “nucleic acid” refers to triple-stranded regions comprising RNA or DNA or both RNA and DNA. The term polynucleotide also includes DNAs or RNAs containing one or more modified bases and DNAs or RNAs with backbones modified for stability or for other reasons. “Modified” bases include, for example, tritylated bases and unusual bases such as inosine. A variety of modifications has been made to DNA and RNA; thus, “nucleic acid” embraces chemically, enzymatically or metabolically modified forms of polynucleotides as typically found in nature, as well as the chemical forms of DNA and RNA characteristic of viruses and cells.

[0110] In addition, the term “DNA” refers only to the primary and secondary structure of the molecule, and does not limit it to any particular tertiary forms. Thus, the term includes double-stranded DNA found, inter alia, in linear DNA molecules (e.g., restriction fragments), viruses, plasmids, and chromosomes. In discussing the structure of particular double-stranded DNA molecules, sequences may be described herein according to the normal convention of giving only the sequence in the 5′ to 3′ direction along the non-transcribed strand of DNA (i.e., the strand having a sequence homologous to the mRNA).

[0111] The term “RNA” refers to the polymeric form of ribonucleotides in its either single-stranded form or a double-stranded helix form. In discussing the structure of particular RNA molecules, sequence may be described herein according to the normal convention of giving the sequence in the 5′ to 3′ direction.

[0112] A “promoter sequence” is a DNA regulatory region capable of binding RNA polymerase in a cell and initiating transcription of a coding sequence. For purposes of defining the present invention, a promoter sequence is bound at its 3′ terminus by the transcription initiation site and extends upstream (5′ direction) to include the minimum number of bases or elements necessary to initiate transcription at levels detectable above background. Within the promoter sequence will be found a transcription initiation site, conveniently defined by mapping with nuclease S1, as well as protein binding domains (consensus sequences) responsible for the binding of RNA polymerase. Prokaryotic promoters contain −10 and −35 consensus sequences. A promoter can also be used to refer to RNA sequences or structures in RNA virus replication.

[0113] The term “replication competent,” refers to the ability of a replicon to generate new copies of itself due to possessing genes necessary for self-generation.

[0114] A “replicon” is any genetic element (e.g., plasmid, chromosome, viral RNA) that functions as an autonomous unit of DNA or RNA replication (i.e. self-replicating). A replicon may originate from a viral genome, and may contain viral non-structural genes for viral genome replication with one or more structural proteins deleted or replaced by genes foreign to the wild type viral genome.

[0115] A “reporter gene” is a gene encoding a protein that is detectable by fluorescence, luminescence, color change, enzyme assay, or histochemistry. For example, a fluorescent reporter protein encoded by a reporter gene may be a fluorescent protein that fluoresces when exposed to a certain wavelength of light (e.g., GFP). A reporter protein may be an enzyme that catalyzes a reaction with a substrate to produce an observable change in that substrate. Enzymes such as luciferase (exemplary substrate luciferin) or β-lactamase (exemplary substrate CCF4) can cause luminescence or allow fluorescence on substrate cleavage, and enzymes such as β-galactosidase (exemplary substrate X-gal (5-bromo-4-chloro-3-indolyl-P-D-galactopyranoside)) and secreted alkaline phosphatase (exemplary substrate PNPP (p-Nitrophenyl Phosphate, Disodium Salt)) can result in a visualizable precipitate upon substrate cleavage. In some embodiments, a reporter protein is detectable by an antibody binding interaction.

[0116] A “vector” is a DNA (or RNA), such as a plasmid, phage, or cosmid, to which another DNA (or RNA) segment may be attached so as to bring about the replication, transcription, expression, or integration of the attached segment.

[0117] As used herein, the term “homology” refers to the overall relatedness between polymeric molecules, e.g. between nucleic acid molecules (e.g. DNA molecules) and/or between polypeptide molecules. Polymeric molecules (e.g. nucleic acid molecules (e.g. DNA molecules) and/or polypeptide molecules) that share a threshold level of similarity or identity determined by alignment of matching residues are termed homologous. Homology is a qualitative term that describes a relationship between molecules and can be based upon the quantitative similarity or identity. Similarity or identity is a quantitative term that defines the degree of sequence match between two compared sequences. In some embodiments, polymeric molecules are “homologous” to one another if their sequences are at least 25%, 30%, 35%, 40%, 45%, 50%, 55%, 60%, 65%, 70%, 75%, 80%, 85%, 90%, 95%, 96%, 97%, 98% or 99% identical or similar. The term “homologous” necessarily refers to a comparison between at least two sequences (polynucleotide or polypeptide sequences). Two polynucleotide sequences are considered homologous if the polypeptides they encode are at least 50%, 60%, 70%, 80%, 90%, 95%, or even 99% for at least one stretch of at least 20 amino acids. In some embodiments, homologous polynucleotide sequences are characterized by the ability to encode a stretch of at least 4-5 uniquely specified amino acids. For polynucleotide sequences less than 60 nucleotides in length, homology is determined by the ability to encode a stretch of at least 4-5 uniquely specified amino acids. Two protein sequences are considered homologous if the proteins are at least 50%, 60%, 70%, 80%, or 90% identical for at least one stretch of at least 20 amino acids.

### EXAMPLES

[0118] The following examples are meant to be illustrative and should not be construed as further limiting. The contents of the figures and all references, patents, and published patent applications cited throughout this application are expressly incorporated herein by reference.

### Example 1: A Replication Competent, Noninfectious SARS-CoV-2 DNA Replicon in Cells

[0119] A. Methods

[0120] 1. Construction of the SARS-CoV-2 Replicon

[0121] The replicon is based on severe acute respiratory syndrome coronavirus 2 isolate Wuhan-Hu-1 (GenBank: NC045512). The SARS-CoV-2 spike (S) protein open reading frame (ORF) was deleted and replaced with a GFP-firefly luciferase fusion reporter (Luc-GFP). The sequences of envelope (E), membrane (M) and their intergenic region were also deleted and replaced with a neomycin resistance gene (Neo) (FIG. 1A). The replicon maintained all the genes and genetic elements necessary for replicating the full-length and subgenomic (sg) RNAs, including replicase complex ORF1ab. Deletion of the structural genes E and M rendered the replicon defective in producing progeny virions. (The N structural gene remains in the replicon). The replicon was linked to a T7 (5′ TAATACGACTCACTATAG 3′) promoter upstream of the 5′ UTR. The T7 RNA polymerase initiates transcription at the underlined G in the promoter sequence. A cassette containing a 26-nucleotide polyA, a HDV ribozyme and T7 terminator was inserted at the 3′ end of the replicon.

[0122] The full-length SARS-CoV-2 replicon is −28 k nucleotides long. Five fragments spanning the T7 promoter, full-length SARS-CoV-2, polyA/RbZ/T7 terminator (FIG. 1A), named F1 to F5, with −30 bps overlap were synthesized by Genewiz (South Plainfield, NJ). pSMART BAC vector (Lucigen) was digested with Not I. F1 and F5 fragments were digested with Mlu I. Equimolar amounts of linearized pSMART BAC vector, F1, and F5 were ligated using Gibson Assembly kit (NEB) according to manufacturer's instruction, resulting in pSMART BAC F(1,5). Equimolar amounts of pSMART BAC F(1,5) digested with Aat II and Asc I, and F2 and F4 digested with Mlu I, were ligated using Gibson Assembly kit, resulting in pSMART BAC F(1,2,4,5). Finally, pSMART BAC F(1,2,4,5) digested with Aat II and Asc I, and F3 digested with Swa I were ligated together using Gibson Assembly Kit, resulting in the full-length noninfectious SARS-Cov-2 replicon construct SEQ ID NO: 13 (the pSMART BAC vector with T7-scv2-luc-GFP replicon).

[0123] A CMV promoter fragment was amplified from the pcDNA3.1 vector by PCR using the forward primer SEQ ID NO: 25 and the reverse primer SEQ ID NO: 26. The construct SEQ ID NO: 13 (the pSMART BAC vector with T7-scv2-luc-GFP replicon) was digested with SwaI and ligated with the CMV promoter fragment using Gibson Assembly Kit, resulting in a pSMART BAC vector with CMV-T7-scv2-luc-GFP replicon, SEQ ID NO: 3.

[0124] 2. Transcription of the SARS-CoV-2 Replicon RNA

[0125] The construct SEQ ID NO: 13 (the pSMART BAC vector with the T7-scv2-luc-GFP replicon) was linearized with Swa I (NEB) digestion, then purified by phenol/chloroform extraction, precipitated with 2 volumes of ethanol, and dissolved in nuclease-free water. The mMESSAGE mMACHINE T7 ultra transcription kit (Invitrogen), which includes a cap analogue Anti-Reverse Cap Analogue (ARCA), was used to generate the replicon RNAs in the correct orientation from the linearized vector according to manufacturer's instruction. Briefly, 100 μl of T7 transcription reaction, containing 4 μg of linearized BAC and 15 μl of extra GTP, was incubated at 37° C. for 2.5 h to increase the length of the transcripts. After incubation, 5 μl of TURBO DNase was added and the reaction was incubated at 37° C. for 15 min to digest DNA. The resulting RNA was purified by Monarch RNA cleanup kit (NEB).

[0126] 3. Electroporation of 293T Cells with the SARS-CoV-2 Replicon RNA

[0127] The cells were harvested using TrypLE Select (Thermofisher Scientific), washed three times with PBS and resuspended in MaxCyte electroporation buffer to 1×108 cells/ml. For 1×106 of cells, 1 μg of replicon RNA was added into resuspended cells. The mixture was immediately transferred to a MaxCyte processing assembly (PA) (OC-100, OC-400 or R-1000) and electroporation was carried out by MaxCyte STX with the pre-loaded programs for transfecting different types of cells. After resting in PA for 20 min, transfected cells were transferred into 30 ml of completed media. After counting and adjusting cell density, the RNA-electroporated cells were plated into 384-well compound assay plates.

[0128] 4. Detection of Sg mRNA Expressing Luc-GFP Fusion Protein

[0129] To confirm the synthesis of the Luc-GFP sg mRNAs, we performed RT-PCR analysis on the transcripts in the electroporated cells. Total RNAs were extracted from 1.2×106 cells by RNeasy mini kit (Qiagen) at 0, 12, 18, 32, 40, and 56 h after electroporation. cDNA was synthesized and amplified a SuperScript™ IV One-Step RT-PCR kit (ThermoFisher Scientific; catalog #12594025) according to manufacturer's instructions. The PCR products were analyzed on an E-Gel 1% agarose gel (ThermoFisher Scientific).

[0130] The forward and reverse primers used to amplify the sg mRNA were: 5′-AGGTTTATACCTTCCCAGGT-3′ (SEQ ID NO: 17) and 5′-TTTGTATTCAGCCCATAGCG-3′ (SEQ ID NO: 18), and the sequences of β-actin primer set were 5′-GAGCACAGAGCCTCGCCTTT-3′ (SEQ ID NO: 19) and 5′-TGGGGTACTTCAGGGTGAGG-3′ (SEQ ID NO: 20). The primers annealed to the leader sequence of 5′ UTR and the Luc-GFP coding region, respectively (FIG. 1A). This resulted in the primer pair only amplifying Luc-GFP sgRNA.

[0131] B. Results

[0132] 1. Production of the SARS-CoV-2 Replicon as Reported by GFP

[0133] Following electroporation of replicon RNA, GFP signal was detected at 12 h. According to the coronavirus replication model (Sawicki, Stanley G et al. “A contemporary view of coronavirus transcription.” Journal of virology vol. 81, 1 (2007): 20-9. doi:10.1128/JVI.01358-06), the viral genome is copied by replicase complex, both continuously to produce minus-strand templates for genome RNA synthesis and discontinuously to produce minus-strand templates for sg mRNA synthesis. These two types RNAs have also been reported recently in the SARS-CoV-2 infected cells (Kim, Dongwan et al. “The Architecture of SARS-CoV-2 Transcriptome.” Cell vol. 181, 4 (2020): 914-921.e10. doi:10.1016/j.cell.2020.04.011). The structural proteins S, E, M and nucleocapsid (N) are encoded by sg mRNAs (FIG. 1A). Therefore, GFP in the replicon RNA transfected cells is most likely also expressed by the sg mRNAs.

[0134] 2. Luc-GFP Sg mRNA was Detected by RT-PCR

[0135] Consistent with the GFP expression, the Luc-GFP sg mRNA was also detected at 12 h post electroporation (FIG. 1B). This indicated that the in vitro transcribed replicon RNA is capable of self-amplifying.

### Example 2: Reporter Signal from Active Replicon RNA Replication

[0136] A. Methods

[0137] 1. Construction of the RdRp Mutant Replicon

[0138] To investigate whether the GFP reporter signal was entirely generated by replicating RNAs, two point mutations, D760N and D761N, were introduced to RdRp (RNA-dependent RNA polymerase) in the SARS-CoV-2 replicon cDNA. The combination of the two mutations inactivates the RdRp and leads to complete loss of native ribonucleotide incorporation (Gordon, Calvin J et al. “Remdesivir is a direct-acting antiviral that inhibits RNA-dependent RNA polymerase from severe acute respiratory syndrome coronavirus 2 with high potency.” The Journal of Biological Chemistry vol. 295, 20 (2020): 6785-6797. doi:10.1074/jbc.RA120.013679). Thus, this construct was prepared and used as a negative control.

[0139] The RdRp mutations were made to the replicon by BAC recombineering (Murray, E et al. “Persistent replication of hepatitis C virus replicons expressing the beta-lactamase reporter in subpopulations of highly permissive Huh7 cells.” J Virol. vol. 77, 2928-2935 (2003): doi:10.1128/jvi.77.5.2928-2935.2003). An ampicillin (Amp) cassette was introduced to the RdRp D760 and D761 mutation site, followed by Gibson assembly approach to replace the Amp cassette with the D760N and D761N (D760N/D761N) mutations. The pSMART BAC vector with the CMV-T7-scv2-luc-GFP replicon (SEQ ID NO: 3) was transformed into SW102 E. coli host which expresses the bacterio-phage λ Red genes gam, bet and exo which are controlled by is repressor cI857. The Red enzymes are able to mediate homologous recombination between DNA fragments as short as 30 bp. A fragment containing an Amp cassette flanked by Asc I restriction sites and adjacent homologous sequence was amplified by PCR using primers 5′-TTTGTGAAT GAGTTTTACGCATATTTGCGTAAACATTTCTCAATGATGATACTCTCTGGCGCGC CGGAACCCCTATTTGTTTATT-3′ (SEQ ID NO: 21) and 5′-CATCTTAATGAAGTCT GTGAATTGCAAAGAACACAAGCCCCAACAGCCTGTAAGACTGGCGCGCCTTACC AATGCTTAATCAGTG-3′ (SEQ ID NO: 22) using plasmid pcDNA3.1(+) as a template. The PCR fragment was then digested with Dpn I at 37° C. for 1 h and purified using the QIAquick PCR purification kit (Qiagen). To prepare the competent SW102 containing the pSMART BAC vector with the CMV-T7-scv2-luc-GFP replicon (SEQ ID NO: 3), the E. coli host was first cultured in LB broth with 12.5 μg/ml of chloramphenicol for 4 h to reach log phase at 32° C., followed by heat shock treatment at 42° C. for 15 minutes to induce expression of λ Red genes. After 3 washes with ice-cold water, 100 ng of PCR fragment containing Amp cassette was electroporated into the competent cells. After 2 h of recovery at 32° C., the electroporated cells were plated onto LB plates containing 100 μg/ml carbenicillin and 12.5 μg/ml chloramphenicol, and then cultured overnight at 32° C. Correct clones were identified by colony PCR followed by restriction enzyme digestion. The DNA comprising pSMART BAC vector with the CMV-T7-scv2-luc-GFP replicon and Amp-resistance gene (pSMART BAC-T7-scv2-replicon-AMP DNA) was prepared using NucleoBond BAC 100 kit (Takara Cat #740579). A fragment containing the RdRp D760N/D761N mutation sequence was amplified by PCR using primers 5′-CGTAAACATTTCTCAATGATGATACTCTCTAACAATGCTGTTGTGTGTTTCAATAG-3′ (SEQ ID NO: 23) and 5′-CAAAGAACACAAGCCCCAACAGCCTGTAAGACTG TATGCGGTGTGTACATAGC-3′ (SEQ ID NO: 24). pSMART BAC-T7-scv2-replicon-AMP DNA was digested with Asc I and then ligated to the fragment containing the RdRp D760N/D761N mutations using Gibson Assembly kit resulting in pSMARTBAC-T7-scv2m-replicon, the vector expressing the double mutant RdRp.

[0140] 2. Transcription of the RdRp Mutant Replicon RNA

[0141] RNA was transcribed as described above in Example 1, and linearized with NotI.

[0142] 3. Electroporation of 293T Cells with the RdRp Mutant Replicon RNA

[0143] Cells were electroporated with replicon RNA as described above in Example 1.

[0144] 4. Detection of Sg mRNA Expressing Luc-GFP Fusion Protein

[0145] Sg mRNA expressing Luc-GFP was detected as described above in Example 1.

[0146] B. Results

[0147] As expected, the mutant replicon RNA failed to express GFP in transfected A549, Calu-1, and Huh-7.5 cells (FIG. 1C). in contrast, all 3 cell lines could fully support the replication of wild type replicons. The data further demonstrated that reporter activities result from active replicon RNA replication and can be used as a readout to evaluate antiviral activity against enzymes encoded by the SARS-CoV-2 replicon.

### Example 3: Dose-Dependent Inhibition of the SARS-CoV-2 Replicon by GS-441524 and GC376

[0148] A. Methods

[0149] 1. Compound Testing in 293T Cells

[0150] In order to demonstrate the ability of the T7-scv2-luc-GFP replicon (SEQ ID NO: 2) to respond to specific inhibition, a series of control experiments were performed. The compounds chosen for these initial studies were GS-441524, the parent compound of the remdesivir prodrug, and GC376. Remdesivir, also known as GS-5734, was developed as an anti-viral against Ebola virus (Warren, Travis K et al. “Therapeutic efficacy of the small molecule GS-5734 against Ebola virus in rhesus monkeys.” Nature vol. 531,7594 (2016): 381-5. doi:10.1038/nature17180), specifically targeting RdRp (Gordon, Calvin J et al. “Remdesivir is a direct-acting antiviral that inhibits RNA-dependent RNA polymerase from severe acute respiratory syndrome coronavirus 2 with high potency.” The Journal of biological chemistry vol. 295, 20 (2020): 6785-6797. doi:10.1074/jbc.RA120.013679). Remdesivir is currently the only drug approved by the US Food and Drug Administration (FDA) to treat hospitalized COVID-19 patients (Grein, Jonathan et al. “Compassionate Use of Remdesivir for Patients with Severe Covid-19.” The New England journal of medicine vol. 382, 24 (2020): 2327-2336. doi:10.1056/NEJMoa2007016). Another notable compound GC376, a broad-spectrum inhibitor against 3C or 3C-like proteases of picornaviruses, is also reported to exert a potent inhibition for the Mpro (main protease, also called 3CLpro) encoded by SARS-CoV-2 (Hung, Hui-Chen et al. “Discovery of M Protease Inhibitors Encoded by SARS-CoV-2.” Antimicrobial agents and chemotherapy vol. 64, 9 e00872-20. 20 Aug. 2020, doi:10.1128/AAC.00872-20).

[0151] In vitro transcribed and capped replicon RNA was prepared and electroporated into 293T cells as described above in Example 1. After electroporation the 293T cells were incubated with increasing concentrations of GS-441524 or GC376 in a 384 well plate. Replicon inhibition was determined by reduction in the number of GFP positive cells and luciferase activity relative to the DMSO control treated cells. GFP positive cells and luciferase activity were recorded at 30 h after electroporation, by counting the number of green cells in each well using an Acumen® eX3 scanner (sptlabtech) or by measuring luciferase activity using EnVision (PerkinElmer).

[0152] 2. Quantification and Data Analysis

[0153] All numerical data are presented as the mean±SD (standard deviations). The 50% effective concentration, EC50, was calculated determined a non-linear, four-parameter curve fitting method using ActivityBase. Data presented in FIG. 1 was prepared using Prism (GraphPad).

[0154] B. Results

[0155] As shown in FIGS. 2A-D, both compounds exhibited antiviral activities in a dose response manner, using either GFP or luciferase as a readout.

[0156] The potencies of GS-441524 in inhibiting the SARS-CoV-2 replicon replication, determined by either % GFP signal or % luciferase activity, were 644.58±54.27 nM or 502.49±109.37 nM respectively. The potencies of GC376 in inhibiting the SARS-CoV-2 replicon replication, determined by either % GFP signal or % luciferase activity, were 22.01±5.13 nM or 29.22±9.17 nM respectively. Even though luciferase readout showed higher variabilities, the EC50 values measured by both reporters were comparable in this assay. No cytotoxicity was detected for either compound at the range of concentrations used in this study (FIGS. 2E, F).

### Example 4: Response of the Replicon to a Panel of Compounds that are Specific to SARS-CoV-2

[0157] A. Methods

[0158] 1. SARS-CoV-2 Replicon with a T7 or T7GG Promoter

[0159] The T7-scv2-luc-GFP replicon of this example was previously described in Example 1.

[0160] A second SARS-CoV-2 replicon of this example, T7GG-scv2-luc-GFP replicon, comprises a T7GG promoter instead of a T7 promoter. The T7GG promoter comprises an extra G residue at the 3′ end of the minimal T7 promoter. It is a variation of the T7 promoter that enhances the yield of in vitro RNA transcription by 5-7 fold. Replicon RNA was prepared from the T7GG-scv2-luc-GFP replicon and electroporated into cells as described above in Example 1.

[0161] 2. Cell Lines

[0162] Cell lines 293T (Clontech, catalog #632180), HEK 293, human lung carcinoma A549 (ATCC®, CCL-185), and human hepatoma Huh7.5 (Apath) cells were maintained in a high-glucose Dulbecco's modified Eagle's medium (DMEM, Invitrogen, catalog #10-013-CV). African green monkey kidney Vero (ATCC, CCL-91) and Vero E6 (ATCC, CRL-1586) cells were cultured in Eagle's Minimum Essential Medium (ATCC®, 30-2003™). Human lung epidermoid carcinoma Calu-1 (ATCC, HTB-54) cells were cultured in McCoy's 5a Medium (ATCC®, 30-2007™). All media were supplemented with 10% fetal bovine serum (FBS; Invitrogen, catalog #10082147) and 1% penicillin/streptomycin. Cells were grown at 37° C. with 5% CO₂.

[0163] 3. Compound Testing

[0164] We tested a panel of published SARS-CoV-2 specific compounds with different reported modes of action (MOA), and sought to determine the impact of various cell lines on the potencies of those compounds. Compound plates were prepared by dispensing compounds (0.2 μl/well) dissolved in DMSO into wells of 384 well poly D lysine-coated plates (Corning 356663) or cell culture-treated, flat-bottom microplate (Corning 3571) using an ECHO acoustic dispenser. Each compound was tested in a 10-point serial 3-fold dilution (final concentrations 42016 nM-2.1 nM). Controls included DMSO only and GS-441524 (final concentration 10 μM). 20,000 transfected cells were added (50 μL/well) using Agilent Bravo to compound plates and the cells were maintained at 37° C./5% CO₂/90% relative humidity.

[0165] Percent GFP signal and percent luciferase activity were determined as described above in Example 3.

[0166] 4. Quantification and Data Analysis

[0167] EC50 data were determined as described above in Example 3.

[0168] B. Results

[0169] In 293T cells, the antiviral potencies of GS-441524 and GC376 measured by T7GG-scv2-luc-GFP replicon (Table 2) were comparable to those determined by T7-scv2-luc-GFP replicon (Table 1, FIGS. 2A-D).

TABLE 1
Antiviral activity against T7-scv2-
luc-GFP replicon (SEQ ID NO: 2)

| | Com- | Mode of | | EC50 |
|---|---|---|---|---|
| Target | pound | action | Cells | (nM) |
| TMPRSS2 | Nafamostat | Entry | 293T | >42016.67 ± 0.0 |
| | | | Vero E6 | >42016.67 ± 0.0 |
| | | | Calu-1 | >42016.67 ± 0.0 |
| | | | A549 | >42016.67 ± 0.0 |
| | Camostat | Entry | 293T | >42016.67 ± 0.0 |
| | | | Vero | >42016.67 ± 0.0 |
| | | | Calu-1 | >42016.67 ± 0.0 |
| | | | A549 | >42016.67 ± 0.0 |
| PIKfyve | Apilimod | Endosome | Calu-1 | >42016.67 ± 0.0 |
| | | entry | Huh-7.5 | >42016.67 ± 0.0 |
| Cathepsin | Relacatib | Endosome | 293T | >42016.67 ± 0.0 |
| L | | entry | Vero | >42016.67 ± 0.0 |
| | | | Calu-1 | >42016.67 ± 0.0 |
| | | | A549 | >42016.67 ± 0.0 |
| RdRp | Remdesivir | RNA | 293T | 11.33 ± 0.0 |
| | | synthesis | Vero | 2238.88 ± 0.0 |
| | | (nucleo- | Huh-7.5 | 18.91 ± 0.0 |
| | | side | Calu-1 | 62.79 ± 0.0 |
| | | prodrug) | A549 | 184.34 ± 0.0 |
| | GS- | RNA | 293T | 602.94 ± 131.37 |
| | 441524 | synthesis | Vero | 302.21 ± 19.82 |
| | | (nucleo- | Huh-7.5 | 1027.09 ± 354.09 |
| | | side) | Calu-1 | 1334.88 ± 269.50 |
| | | | A549 | 1467.59 ± 163.00 |
| Mpro | GC376 | poly- | 293T | 20.82 ± 5.37 |
| | | protein | Vero | 557.39 ± 186.73 |
| | | cleavage | Huh-7.5 | 17.29 ± 5.99 |
| | | | Calu-1 | 52.81 ± 17.38 |
| | | | A549 | 373.17 ± 204.74 |
| | PF- | poly- | 293T | 69.95 ± 14.19 |
| | 00835231 | protein | Vero | 9356.68 ± 0.0 |
| | | cleavage | Huh-7.5 | 175.07 ± 55.95 |
| | | | Calu-1 | 32.74 ± 5.42 |
| | | | A549 | 54.97 ± 0.0 |

TABLE 2
Antiviral activity against T7GG-scv2-luc-GFP replicon

| | Com- | Mode of | | EC50 |
|---|---|---|---|---|
| Target | pound | action | Cells | (nM) |
| TMPRSS2 | Nafamostat | Entry | 293T | >42016.67 ± 0.0 |
| | Camostat | Entry | 293T | >42016.67 ± 0.0 |
| PIKfyve | Apilimod | Endosome | 293T | >42016.67 ± 0.0 |
| | | entry | | |
| Cathepsin | Relacatib | Endosome | 293T | >42016.67 ± 0.0 |
| L | | entry | | |
| RdRp | GS- | RNA | 293T | 656.60 ± 66.40 |
| | 441524 | synthesis | Vero | 324.31 ± 173.44 |
| | | | Huh-7.5 | 830.65 ± 201.37 |
| | | | Calu-1 | 1000.46 ± 217.21 |
| | | | A549 | 715.52 ± 310.70 |
| Mpro | GC376 | poly- | 293T | 50.83 ± 16.37 |
| | | protein | Vero | 900.08 ± 77.11 |
| | | cleavage | Huh-7.5 | 43.94 ± 5.86 |
| | | | Calu-1 | 130.57 ± 21.57 |
| | | | A549 | 1799.80 ± 219.90 |
| | PF- | poly- | 293T | 174.44 ± 53.16 |
| | 00835231 | protein | Vero | 15009.56 ± 3101.34 |
| | | cleavage | Huh-7.5 | 158.66 ± 44.42 |
| | | | Calu-1 | 50.19 ± 4.12 |
| | | | A549 | 128.56 ± 22.37 |
| | Z-LVG | poly- | 293T | >42016.67 ± 0.0 |
| | DMF | protein | Vero | >42016.67 ± 0.0 |
| | | cleavage | Huh-7.5 | >42016.67 ± 0.0 |
| | | | Calu-1 | >42016.67 ± 0.0 |
| | | | A549 | >42016.67 ± 0.0 |

[0170] GS-441524 was also active in Vero, Calu-1, A547 and Huh-7.5 cells. GC376 was highly potent in Calu-1 and Huh-7.5 cells, but only modestly active in A549 and Vero cells. In contrast, the EC50 values of PF-00835231 (de Vries, Maren et al. “Comparative study of a 3CLpro inhibitor and remdesivir against both major SARS-CoV-2 clades in human airway models.” bioRxiv preprint doi: doi.org/10.1101/2020.08.28.272880) ranged from 50 to 200 nM in Calu-1, A547, Huh-7.5 cells, and was 75-300 fold lower in Vero cells (EC50 of 15,000 nM). Z-LVG DMF was not active in any of the cells tested. Even though both GC376 and PF-00835231 are protease inhibitors, they showed different cell dependent potency change. The biological mechanism by which the compounds exhibited dramatic differences of antiviral activities in different cells is still unknown. Since the A549, Calu-1 and Huh-7.5 showed similar levels of the transfection efficiencies (FIG. 1C), the shift of potency is unlikely to be caused by GFP expression levels. It is possible the viral Mpro or the compounds are modified or metabolized differently in those cells.

[0171] The replicon assay was performed in 384-well plates using automated liquid handling systems, therefore, the format is capable of screening large compound libraries. Results are available as early as 24 h following the drug incubation. The replicon also allows the identification of molecules that target proteins other than RdRp and Mpro whose functions are unknown or for which in vitro enzymatic assays are not available. The replicon also allows identification of any molecules that can affect any other aspects of viral RNA replication. Due to the deletion of the structural proteins, S, E and M, this replicon is not capable of testing compounds that inhibit viral entry, assembly or release.

### Example 5: A Replication Competent, Noninfectious MERS DNA Replicon

[0172] A. Methods

[0173] 1. Construction of the MERS Replicon

[0174] Similar to the SARS-CoV-2 replicon described in Example 1 above, a replicon based on Middle East respiratory syndrome (MERS)-related coronavirus isolate HCoV-EMC/2012 (Genbank: NC_019843.3; SEQ ID NO: 27) was generated. The MERS HcoV-EMC/2012 spike (S) protein open reading frame (ORF) was deleted and replaced with an GFP-firefly luciferase fusion reporter (Luc-GFP). Three different replacements of the S protein with Luc-GFP were created in pSmart BAC vectors. In T7-mcv-replicon1 (SEQ ID NO: 28), Luc-GFP simply replaced the S protein ORF to create a direct fusion with ORF1ab, and a repair insertion was added (see FIG. 3, hatched box). T7-mcv-replicon2 (SEQ ID NO: 29) is similar to T7-mcv-replicon1; however, the S protein start codons were also knocked-out (T21414C, T21498C; see asterisks in FIG. 3), and the S protein start codon was reintroduced after ORF1b. T7-mcv-replicon3 (SEQ ID NO: 30) is also similar to T7-mcv-replicon1; however, a T2A self-cleaving peptide was added after the repair insertion and before Luc-GFP (see diagram in FIG. 3).

[0175] The sequences of envelope (E), membrane (M) and their intergenic region were also deleted and replaced with a neomycin resistance gene (Neo). The replicon maintained all the genes and genetic elements necessary for replicating the full-length and subgenomic (sg) RNAs, including replicase complex ORF1ab. Deletion of the structural genes E and M rendered the replicon defective in producing progeny virions. (The N structural gene remains in the replicon). The replicon was linked to a T7 promoter upstream of the 5′ UTR. A cassette containing a 26-nucleotide polyA, a HDV ribozyme and T7 terminator was inserted at the 3′ end of the replicon.

[0176] The MERS replicons were assembled as follows. The full-length MERS replicon is −28 k nucleotides long. Five fragments spanning the T7 promoter, full-length MERS, polyA/RbZ/T7 terminator (FIG. 1A), named F1 to F5, with −30 bps overlap were synthesized by Genewiz (South Plainfield, NJ). pSMART BAC vector (Lucigen) was digested with Not I. F1 and F5 fragments were digested with Mlu I. Equimolar amounts of linearized pSMART BAC vector, F1, and F5 were ligated using Gibson Assembly kit (NEB) according to manufacturer's instruction, resulting in pSMART BAC F(1,5). Equimolar amounts of pSMART BAC F(1,5) digested with Aat II and Asc I, and F2 and F4 digested with Mlu I, were ligated using Gibson Assembly kit, resulting in pSMART BAC F(1,2,4,5). Finally, pSMART BAC F(1,2,4,5) digested with Aat II and Asc I, and F3 digested with Mlu I were ligated together using Gibson Assembly Kit, resulting in the full-length noninfectious MERS replicon construct (the pSMART BAC vector with T7-mcv-luc-GFP replicon).

[0177] The MERS replicons were then transcribed, and electroporated into 293T cells as described in Example 1 above to test their activity. The numbers of GFP positive cells, as well as GFP intensity were measured.

[0178] B. Results

[0179] Cells transfected with pSmart BAC T7-mcv-replicon1 (SEQ ID NO: 28, direct fusion of Luc-GFP with ORF1ab) had a detectable but low number of cells expressing GFP and a similarly low intensity of GFP. In contrast, both pSmart BAC T7-mcv-replicon2 (SEQ ID NO: 29, reintroduced start codon) and pSmart BAC T7-mcv-replicon3 (SEQ ID NO: 30, T2A peptide) had a much higher number of cells expressing luc-GFP and similarly high intensity levels of luc-GFP. The qualitative results are summarized in table 3 below.

TABLE 3
Comparison of MERS Replicon Activities

| | Number of GFP- | GFP |
|---|---|---|
| Replicon | positive cells | intensity |
| pSmart BAC T7-mcv- | ++ | ++ |
| replicon1 | | |
| pSmart BAC T7-mcv- | +++++ | +++++ |
| replicon2 | | |
| pSmart BAC T7-mcv- | +++++ | +++++ |
| replicon3 | | |

### Example 6: Response of the MERS Replicon to a Panel of Compounds that are Specific to SARS-CoV-2

[0180] A. Methods

[0181] Two different SARS coronavirus replicons (T7-scv2-replicon, SEQ ID NO: 13 described above; and T7-scv1-replicon, SEQ ID NO: 32, an earlier SARS virus described below) and a MERS replicon T7-mcv-replicon2 (SEQ ID NO: 29) were tested with a panel of compounds with different MOAs to compare their EC50.

[0182] T7-scv1-replicon (Severe acute respiratory syndrome coronavirus 1; SARS-CoV-1) was constructed as described in Example 1 above, using SARS coronavirus isolate CUHK-W1 (GenBank: AY278554; SEQ ID NO: 31) as the basis of the construct. The SARS-CoV-1 spike (S) protein ORF was deleted and replaced with a GFP-firefly luciferase fusion reporter (Luc-GFP). The sequences of envelope (E), membrane (M) and their intergenic region were also deleted and replaced with a neomycin resistance gene (Neo). The full-length SARS-CoV-1 replicon is −28 k nucleotides long. Five fragments spanning the T7 promoter, full-length SARS-CoV-1, polyA/RbZ/T7 terminator (FIG. 1A), named F1 to F5, with −30 bps overlap were synthesized by Genewiz (South Plainfield, NJ). pSMART BAC vector (Lucigen) was digested with Not I. F1 and F5 fragments were digested with Mlu I. Equimolar amounts of linearized pSMART BAC vector, F1, and F5 were ligated using Gibson Assembly kit (NEB) according to manufacturer's instruction, resulting in pSMART BAC F(1,5). Equimolar amounts of pSMART BAC F(1,5) digested with Aat II and Asc I, F2 digested with Mlu I and F4 digested with Pme I, were ligated using Gibson Assembly kit, resulting in pSMART BAC F(1,2,4,5). Finally, pSMART BAC F(1,2,4,5) digested with Aat II and Asc I, and F3 digested with Pme I were ligated together using Gibson Assembly Kit, resulting in the full-length noninfectious SARS-Cov-1 replicon construct (the pSMART BAC vector with T7-scv1-luc-GFP replicon).

[0183] 293Tcells were transfected with each of the replicons and compounds were tested on the transfected cells as described in Example 4 above.

TABLE 4
Antiviral activity (EC50) against coronavirus replicons
pSmart BAC T7-scv2-replicon, pSmart BAC T7-scv1-replicon,
pSmart BAC T7-mcv-replicon in 293T cells

| | Com- | T7-scv2- | T7-scv1- | T7-mcv- |
|---|---|---|---|---|
| Target | pound | replicon | replicon | replicon |
| RdRp | GS-5734 | 15.6 ± 5.1 | 42.9 ± 3.4 | 81.5 ± 8.8 |
| | (Remdesivir) | (n = 5) | (n = 4) | (n = 4) |
| | GS- | 603 ± 105.5 | 1110 ± 86.5 | 5580 ± 356.9 |
| | 441524 | (n = 22) | (n = 12) | (n = 3) |
| | (Remdesivir | | | |
| | parent) | | | |
| Mpro | GC373 | 19.7 ± 4.6 | 74 ± 4.5 | 29.2 ± 3.7 |
| | | (n = 11) | (n = 10) | (n = 3) |
| | GC376 | 20.8 ± 5.6 | 75.9 ± 23.2 | 35.2 ± 5.3 |
| | | (n = 59) | (n = 12) | (n = 3) |
| | PF- | 74.8 ± 20.0 | 167 ± 15.3 | 101 ± 33.0 |
| | 00835231 | (n = 37) | (n = 14) | (n = 4) |
| | MK-3034 | 3550 ± 346.5 | 6410 ± 427.4 | 4670 ± 518.6 |
| | (Boceprevir) | (n = 2) | (n = 8) | (n = 3) |

[0184] Compounds targeting RdRp (GS-5734 and GS-441524) require a greater concentration to achieve 50% inhibition in cells transfected with MERS replicon (T7-mcv-replicon) than in cells transfected with either the SARS-CoV-2 replicon (T7-scv2-replicon) or the SARS-CoV-1 replicon (T7-scv1-replicon). Compounds targeting Mpro have similar EC50 concentrations in cells transfected with MERS replicon (T7-mcv-replicon) compared to cells transfected with SARS-CoV-2 replicon (T7-scv2-replicon).

[0185] Table 5 below provides a listing of certain sequences referenced herein. Nucleotide sequences are provided from 5′ to 3′. Amino acid sequences are provided from N-terminus to C-terminus.

Lengthy table referenced here
US20230357870A1-20231109-T00001
Please refer to the end of the specification for access instructions.

### EQUIVALENTS

[0186] The foregoing written specification is considered to be sufficient to enable one skilled in the art to practice the embodiments. The foregoing description and Examples detail certain embodiments and describes the best mode contemplated by the inventors. It will be appreciated, however, that no matter how detailed the foregoing may appear in text, the embodiment may be practiced in many ways and should be construed in accordance with the appended claims and any equivalents thereof.

[0187] As used herein, the articles “a” and “an” refer to one or to more than one (i.e., to at least one) of the grammatical object of the article. By way of example, “an element” means one element or more than one element. Furthermore, use of the term “including” as well as other forms, such as “include,” “includes,” and “included,” is not limiting.

[0188] All ranges disclosed herein are inclusive of the recited endpoint and independently combinable (for example, the range of “from 50 mg to 500 mg” is inclusive of the endpoints, 50 mg and 500 mg, and all the intermediate values). The endpoints of the ranges and any values disclosed herein are not limited to the precise range or value; they are sufficiently imprecise to include values approximating these ranges and/or values.

[0189] As used herein, the term “comprising” may include the embodiments “consisting of” and “consisting essentially of” The terms “comprise(s),” “include(s),” “having,” “has,” “may,” “contain(s),” and variants thereof, as used herein, are intended to be open-ended transitional phrases, terms, or words that require the presence of the named ingredients/steps and permit the presence of other ingredients/steps. However, such description should be construed as also describing compositions or processes as “consisting of” and “consisting essentially of” the enumerated components, which allows the presence of only the named components or compounds, along with any acceptable carriers or fluids, and excludes other components or compounds.

[0190] As used herein, the term “about” used in quantitative terms refers to plus or minus 10% of the value it modifies (rounded up to the nearest whole number if the value is not sub-dividable, such as a number of molecules or nucleotides).

[0191] All references (e.g., publications or patents or patent applications) cited herein are incorporated herein by reference in their entirety and for all purposes to the same extent as if each individual reference (e.g., publication or patent or patent application) was specifically and individually indicated to be incorporated by reference in its entirety for all purposes. Other embodiments are within the following claims.

LENGTHY TABLES
The patent application contains a lengthy table section. A copy of the table is available in electronic form from the USPTO web site (https://seqdata.uspto.gov/?pageRequest=docDetail&DocID=US20230357870A1). An electronic copy of the table will also be available from the USPTO upon request and payment of the fee set forth in 37 CFR 1.19(b)(3).

What is claimed is:

1. A coronavirus reporter replicon comprising:
a. one or more SARS-CoV-2 genes for coronavirus viral RNA replication, wherein the one or more SARS-CoV-2 genes comprise ORF1ab (positions 266-21,555 of SEQ ID NO: 1), ORF3a (positions 25,393-26,220 of SEQ ID NO: 1), ORF6 (positions 27,202-27,387 of SEQ ID NO: 1), ORF7a/b (positions 27,394-27,887 of SEQ ID NO: 1), ORF8 (positions 27,894-28,259 of SEQ ID NO: 1), and ORF10 (positions 29,558-29,674 of SEQ ID NO: 1), or sequences that are at least 90%, 91%, 92%, 93%, 94%, 95%, 96%, 97%, 98%, or 99% homologous to those genes; and
b. at least one reporter gene; and
wherein one or more of a spike ORF, an envelope ORF, and a membrane ORF is replaced with the reporter gene, and
wherein the coronavirus reporter replicon is replication competent.

2.-15. (canceled)

16. The coronavirus reporter replicon of claim 1, wherein at least one of the SARS-CoV-2 genes encodes RNA-dependent RNA polymerase (RdRp) and wherein the RdRp sequence is at least 90% homologous to SEQ ID NO: 9.

17.-23. (canceled)

24. The coronavirus reporter replicon of claim 1, wherein the at least one reporter gene comprises a gene encoding nanoluciferase or a fusion gene encoding firefly luciferase and GFP.

25.-31. (canceled)

32. The coronavirus reporter replicon of claim 1, wherein the coronavirus reporter replicon comprises nucleotides 284-28,130 of SEQ ID NO: 2 or nucleotides 284-26,118 of SEQ ID NO: 5, or
a sequence that is 90%, 91%, 92%, 93%, 94%, 95%, 96%, 97%, 98%, or 99% homologous to nucleotides 284-28,130 of SEQ ID NO: 2 or nucleotides 284-26,118 of SEQ ID NO: 5.

33. The coronavirus reporter replicon of claim 1, wherein the coronavirus reporter replicon comprises nucleotides 284-28,130 of SEQ ID NO: 2 or a sequence that is 90%, 91%, 92%, 93%, 94%, 95%, 96%, 97%, 98%, or 99% homologous to nucleotides 284-28,130 of SEQ ID NO: 2.

34. The coronavirus reporter replicon of claim 1, wherein the coronavirus reporter replicon comprises nucleotides 284-26,118 of SEQ ID NO: 5 or a sequence that is 90%, 91%, 92%, 93%, 94%, 95%, 96%, 97%, 98%, or 99% homologous to nucleotides 284-26,118 of SEQ ID NO: 5.

35.-40. (canceled)

41. A vector comprising the sequence encoding the coronavirus reporter replicon of claim 1.

42. The vector of claim 41, further comprising
a. at least one promoter, wherein the at least one promoter comprises a T7 promoter, a T7GG promoter, a T7GGG promoter, an EF-1a promoter, a human pol I promoter, a CMV promoter, SP6, or a CMV/T7 dual promoter; and
b. a terminator cassette, wherein the terminator cassette comprises a polyA sequence, hepatitis D virus ribozyme sequence, and/or T7 terminator.

43.-61. (canceled)

62. A cell line transfected with the vector of claim 41.

63. (canceled)

64. The cell line of claim 62, wherein the cell line is HEK 293T, Huh7.5, Calu-1, A549, or Vero.

65. (canceled)

66. A method for assaying a candidate agent for inhibition of SARS-CoV-2 replication and/or translation comprising:
a. providing the cell line of claim 62,
b. combining the cell line with a candidate agent for inhibiting SARS-CoV-2; and
c. determining whether the candidate agent decreases the expression and/or activity of the reporter gene.

67.-71. (canceled)

72. A coronavirus reporter replicon comprising:
a. one or more Middle East Respiratory Syndrome (MERS) genes for coronavirus viral RNA replication, wherein the one or more MERS genes comprise ORF1ab (positions 279-21,514 of SEQ ID NO: 27), ORF3 (positions 25,532-25,843 of SEQ ID NO: 27), ORF4a (positions 25,852-26,181 of SEQ ID NO: 27), ORF4b (positions 26,093-26,833 of SEQ ID NO: 27), ORF5 (positions 26,840-27,514 of SEQ ID NO: 27), and ORF8b (positions 28,762-29,100 of SEQ ID NO: 27), or sequences that are at least 90%, 91%, 92%, 93%, 94%, 95%, 96%, 97%, 98%, or 99% homologous to those genes; and
b. at least one reporter gene; and
wherein one or more of a spike ORF, an envelope ORF, and a membrane ORF is replaced with the reporter gene, and
wherein the coronavirus reporter replicon is replication competent.

73. The coronavirus reporter replicon of claim 72, wherein at least one of the MERS genes encodes RNA-dependent RNA polymerase (RdRp) and wherein the RdRp sequence is at least 90% homologous to SEQ ID NO: 34.

74. The coronavirus reporter replicon of claim 72, wherein the at least one reporter gene comprises a gene encoding nanoluciferase or a fusion gene encoding firefly luciferase and GFP.

75. The coronavirus reporter replicon of claim 72, wherein the coronavirus reporter replicon comprises nucleotides 296-28,103 of SEQ ID NO: 28, nucleotides 296-28,104 of SEQ ID NO: 29, or nucleotides 296-28,172 of SEQ ID NO: 30, or
a sequence that is 90%, 91%, 92%, 93%, 94%, 95%, 96%, 97%, 98%, or 99% homologous to nucleotides 296-28,103 of SEQ ID NO: 28, nucleotides 296-28,104 of SEQ ID NO: 29, or nucleotides 296-28,172 of SEQ ID NO: 30.

76. The coronavirus reporter replicon of claim 72, wherein the coronavirus reporter replicon comprises nucleotides 296-28,103 of SEQ ID NO: 28 or a sequence that is 90%, 91%, 92%, 93%, 94%, 95%, 96%, 97%, 98%, or 99% homologous to nucleotides 296-28,103 of SEQ ID NO: 28.

77. The coronavirus reporter replicon of claim 72, wherein the coronavirus reporter replicon comprises nucleotides 296-28,104 of SEQ ID NO: 29 or a sequence that is 90%, 91%, 92%, 93%, 94%, 95%, 96%, 97%, 98%, or 99% homologous to nucleotides 296-28,104 of SEQ ID NO: 29.

78. The coronavirus reporter replicon of claim 72, wherein the coronavirus reporter replicon comprises nucleotides 296-28,172 of SEQ ID NO: 30 or a sequence that is 90%, 91%, 92%, 93%, 94%, 95%, 96%, 97%, 98%, or 99% homologous to nucleotides 296-28,172 of SEQ ID NO: 30.

79. A vector comprising the sequence encoding the coronavirus reporter replicon of claim 72.

80. The vector of claim 79, further comprising
a. at least one promoter, wherein the at least one promoter comprises a T7 promoter, a T7GG promoter, a T7GGG promoter, an EF-1a promoter, a human pol I promoter, a CMV promoter, SP6, or a CMV/T7 dual promoter; and
b. a terminator cassette, wherein the terminator cassette comprises a polyA sequence, hepatitis D virus ribozyme sequence, and/or T7 terminator.

81. A cell line transfected with the vector of claim 79.

82. The cell line of claim 81, wherein the cell line is HEK 293T, Huh7.5, Calu-1, A549, or Vero.

83. A method for assaying a candidate agent for inhibition of MERS replication and/or translation comprising:
a. providing the cell line of claim 81,
b. combining the cell line with a candidate agent for inhibiting MERS; and
c. determining whether the candidate agent decreases the expression and/or activity of the reporter gene.

84. A coronavirus reporter replicon comprising:
a. one or more SARS-CoV-1 genes for coronavirus viral RNA replication, wherein the one or more SARS-CoV-1 genes are chosen from ORF1ab (positions 250-21,470 of SEQ ID NO: 31), ORF3a (positions 25,253-26,077 of SEQ ID NO: 31), ORF6 (positions 27,059-27,250 of SEQ ID NO: 31), ORF7a (positions 27,258-27,626 of SEQ ID NO: 32), ORF7b (positions 27,623-27,757 of SEQ ID NO: 31), ORF8a (positions 27,764-27,883 of SEQ ID NO: 31), and ORF8b (positions 27,849-28,103 of SEQ ID NO: 31) or sequences that are at least 90%, 91%, 92%, 93%, 94%, 95%, 96%, 97%, 98%, or 99% homologous to those genes; and
b. at least one reporter gene; and
wherein one or more of a spike ORF, an envelope ORF, and a membrane ORF is replaced with the reporter gene, and
wherein the coronavirus reporter replicon is replication competent.

85. The coronavirus reporter replicon of claim 84, wherein at least one of the SARS-CoV-1 genes encodes RNA-dependent RNA polymerase (RdRp) and wherein the RdRp sequence is at least 90% homologous to SEQ ID NO: 35.

86. The coronavirus reporter replicon of claim 84, wherein the at least one reporter gene comprises a gene encoding nanoluciferase or a fusion gene encoding firefly luciferase and GFP.

87. The coronavirus reporter replicon of claim 84, wherein the coronavirus reporter replicon comprises nucleotides 283-27,898 of SEQ ID NO: 32 or a sequence that is 90%, 91%, 92%, 93%, 94%, 95%, 96%, 97%, 98%, or 99% homologous to nucleotides 283-27,898 of SEQ ID NO: 32.

88. A vector comprising the sequence encoding the coronavirus reporter replicon of claim 84.

89. The vector of claim 88, further comprising
a. at least one promoter, wherein the at least one promoter comprises a T7 promoter, a T7GG promoter, a T7GGG promoter, an EF-1a promoter, a human pol I promoter, a CMV promoter, SP6, or a CMV/T7 dual promoter; and
b. a terminator cassette, wherein the terminator cassette comprises a polyA sequence, hepatitis D virus ribozyme sequence, and/or T7 terminator.

90. A cell line transfected with the vector of claim 88.

91. The cell line of claim 90, wherein the cell line is HEK 293T, Huh7.5, Calu-1, A549, or Vero.

92. A method for assaying a candidate agent for inhibition of SARS-CoV-1 replication and/or translation comprising:
a. providing the cell line of claim 90,
b. combining the cell line with a candidate agent for inhibiting SARS-CoV-1; and
c. determining whether the candidate agent decreases the expression and/or activity of the reporter gene.

The application's sequence listing, which the Patent Office published only in electronic form, follows.

SEQUENCE LISTING (35 sequences)

SEQ ID NO: 1 - DNA, 29903 bp, SARS-CoV-2
attaaaggtttataccttcccaggtaacaaaccaaccaactttcgatctcttgtagatctgttctctaaacgaactttaaaatctgtgtggctgtcactcggctgcatgcttagtgcactcacgcagtataattaataactaattactgtcgttgacaggacacgagtaactcgtctatcttctgcaggctgcttacggtttcgtccgtgttgcagccgatcatcagcacatctaggtttcgtccgggtgtgaccgaaaggtaagatggagagccttgtccctggtttcaacgagaaaacacacgtccaactcagtttgcctgttttacaggttcgcgacgtgctcgtacgtggctttggagactccgtggaggaggtcttatcagaggcacgtcaacatcttaaagatggcacttgtggcttagtagaagttgaaaaaggcgttttgcctcaacttgaacagccctatgtgttcatcaaacgttcggatgctcgaactgcacctcatggtcatgttatggttgagctggtagcagaactcgaaggcattcagtacggtcgtagtggtgagacacttggtgtccttgtccctcatgtgggcgaaataccagtggcttaccgcaaggttcttcttcgtaagaacggtaataaaggagctggtggccatagttacggcgccgatctaaagtcatttgacttaggcgacgagcttggcactgatccttatgaagattttcaagaaaactggaacactaaacatagcagtggtgttacccgtgaactcatgcgtgagcttaacggaggggcatacactcgctatgtcgataacaacttctgtggccctgatggctaccctcttgagtgcattaaagaccttctagcacgtgctggtaaagcttcatgcactttgtccgaacaactggactttattgacactaagaggggtgtatactgctgccgtgaacatgagcatgaaattgcttggtacacggaacgttctgaaaagagctatgaattgcagacaccttttgaaattaaattggcaaagaaatttgacaccttcaatggggaatgtccaaattttgtatttcccttaaattccataatcaagactattcaaccaagggttgaaaagaaaaagcttgatggctttatgggtagaattcgatctgtctatccagttgcgtcaccaaatgaatgcaaccaaatgtgcctttcaactctcatgaagtgtgatcattgtggtgaaacttcatggcagacgggcgattttgttaaagccacttgcgaattttgtggcactgagaatttgactaaagaaggtgccactacttgtggttacttaccccaaaatgctgttgttaaaatttattgtccagcatgtcacaattcagaagtaggacctgagcatagtcttgccgaataccataatgaatctggcttgaaaaccattcttcgtaagggtggtcgcactattgcctttggaggctgtgtgttctcttatgttggttgccataacaagtgtgcctattgggttccacgtgctagcgctaacataggttgtaaccatacaggtgttgttggagaaggttccgaaggtcttaatgacaaccttcttgaaatactccaaaaagagaaagtcaacatcaatattgttggtgactttaaacttaatgaagagatcgccattattttggcatctttttctgcttccacaagtgcttttgtggaaactgtgaaaggtttggattataaagcattcaaacaaattgttgaatcctgtggtaattttaaagttacaaaaggaaaagctaaaaaaggtgcctggaatattggtgaacagaaatcaatactgagtcctctttatgcatttgcatcagaggctgctcgtgttgtacgatcaattttctcccgcactcttgaaactgctcaaaattctgtgcgtgttttacagaaggccgctataacaatactagatggaatttcacagtattcactgagactcattgatgctatgatgttcacatctgatttggctactaacaatctagttgtaatggcctacattacaggtggtgttgttcagttgacttcgcagtggctaactaacatctttggcactgtttatgaaaaactcaaacccgtccttgattggcttgaagagaagtttaaggaaggtgtagagtttcttagagacggttgggaaattgttaaatttatctcaacctgtgcttgtgaaattgtcggtggacaaattgtcacctgtgcaaaggaaattaaggagagtgttcagacattctttaagcttgtaaataaatttttggctttgtgtgctgactctatcattattggtggagctaaacttaaagccttgaatttaggtgaaacatttgtcacgcactcaaagggattgtacagaaagtgtgttaaatccagagaagaaactggcctactcatgcctctaaaagccccaaaagaaattatcttcttagagggagaaacacttcccacagaagtgttaacagaggaagttgtcttgaaaactggtgatttacaaccattagaacaacctactagtgaagctgttgaagctccattggttggtacaccagtttgtattaacgggcttatgttgctcgaaatcaaagacacagaaaagtactgtgcccttgcacctaatatgatggtaacaaacaataccttcacactcaaaggcggtgcaccaacaaaggttacttttggtgatgacactgtgatagaagtgcaaggttacaagagtgtgaatatcacttttgaacttgatgaaaggattgataaagtacttaatgagaagtgctctgcctatacagttgaactcggtacagaagtaaatgagttcgcctgtgttgtggcagatgctgtcataaaaactttgcaaccagtatctgaattacttacaccactgggcattgatttagatgagtggagtatggctacatactacttatttgatgagtctggtgagtttaaattggcttcacatatgtattgttctttctaccctccagatgaggatgaagaagaaggtgattgtgaagaagaagagtttgagccatcaactcaatatgagtatggtactgaagatgattaccaaggtaaacctttggaatttggtgccacttctgctgctcttcaacctgaagaagagcaagaagaagattggttagatgatgatagtcaacaaactgttggtcaacaagacggcagtgaggacaatcagacaactactattcaaacaattgttgaggttcaacctcaattagagatggaacttacaccagttgttcagactattgaagtgaatagttttagtggttatttaaaacttactgacaatgtatacattaaaaatgcagacattgtggaagaagctaaaaaggtaaaaccaacagtggttgttaatgcagccaatgtttaccttaaacatggaggaggtgttgcaggagccttaaataaggctactaacaatgccatgcaagttgaatctgatgattacatagctactaatggaccacttaaagtgggtggtagttgtgttttaagcggacacaatcttgctaaacactgtcttcatgttgtcggcccaaatgttaacaaaggtgaagacattcaacttcttaagagtgcttatgaaaattttaatcagcacgaagttctacttgcaccattattatcagctggtatttttggtgctgaccctatacattctttaagagtttgtgtagatactgttcgcacaaatgtctacttagctgtctttgataaaaatctctatgacaaacttgtttcaagctttttggaaatgaagagtgaaaagcaagttgaacaaaagatcgctgagattcctaaagaggaagttaagccatttataactgaaagtaaaccttcagttgaacagagaaaacaagatgataagaaaatcaaagcttgtgttgaagaagttacaacaactctggaagaaactaagttcctcacagaaaacttgttactttatattgacattaatggcaatcttcatccagattctgccactcttgttagtgacattgacatcactttcttaaagaaagatgctccatatatagtgggtgatgttgttcaagagggtgttttaactgctgtggttatacctactaaaaaggctggtggcactactgaaatgctagcgaaagctttgagaaaagtgccaacagacaattatataaccacttacccgggtcagggtttaaatggttacactgtagaggaggcaaagacagtgcttaaaaagtgtaaaagtgccttttacattctaccatctattatctctaatgagaagcaagaaattcttggaactgtttcttggaatttgcgagaaatgcttgcacatgcagaagaaacacgcaaattaatgcctgtctgtgtggaaactaaagccatagtttcaactatacagcgtaaatataagggtattaaaatacaagagggtgtggttgattatggtgctagattttacttttacaccagtaaaacaactgtagcgtcacttatcaacacacttaacgatctaaatgaaactcttgttacaatgccacttggctatgtaacacatggcttaaatttggaagaagctgctcggtatatgagatctctcaaagtgccagctacagtttctgtttcttcacctgatgctgttacagcgtataatggttatcttacttcttcttctaaaacacctgaagaacattttattgaaaccatctcacttgctggttcctataaagattggtcctattctggacaatctacacaactaggtatagaatttcttaagagaggtgataaaagtgtatattacactagtaatcctaccacattccacctagatggtgaagttatcacctttgacaatcttaagacacttctttctttgagagaagtgaggactattaaggtgtttacaacagtagacaacattaacctccacacgcaagttgtggacatgtcaatgacatatggacaacagtttggtccaacttatttggatggagctgatgttactaaaataaaacctcataattcacatgaaggtaaaacattttatgttttacctaatgatgacactctacgtgttgaggcttttgagtactaccacacaactgatcctagttttctgggtaggtacatgtcagcattaaatcacactaaaaagtggaaatacccacaagttaatggtttaacttctattaaatgggcagataacaactgttatcttgccactgcattgttaacactccaacaaatagagttgaagtttaatccacctgctctacaagatgcttattacagagcaagggctggtgaagctgctaacttttgtgcacttatcttagcctactgtaataagacagtaggtgagttaggtgatgttagagaaacaatgagttacttgtttcaacatgccaatttagattcttgcaaaagagtcttgaacgtggtgtgtaaaacttgtggacaacagcagacaacccttaagggtgtagaagctgttatgtacatgggcacactttcttatgaacaatttaagaaaggtgttcagataccttgtacgtgtggtaaacaagctacaaaatatctagtacaacaggagtcaccttttgttatgatgtcagcaccacctgctcagtatgaacttaagcatggtacatttacttgtgctagtgagtacactggtaattaccagtgtggtcactataaacatataacttctaaagaaactttgtattgcatagacggtgctttacttacaaagtcctcagaatacaaaggtcctattacggatgttttctacaaagaaaacagttacacaacaaccataaaaccagttacttataaattggatggtgttgtttgtacagaaattgaccctaagttggacaattattataagaaagacaattcttatttcacagagcaaccaattgatcttgtaccaaaccaaccatatccaaacgcaagcttcgataattttaagtttgtatgtgataatatcaaatttgctgatgatttaaaccagttaactggttataagaaacctgcttcaagagagcttaaagttacatttttccctgacttaaatggtgatgtggtggctattgattataaacactacacaccctcttttaagaaaggagctaaattgttacataaacctattgtttggcatgttaacaatgcaactaataaagccacgtataaaccaaatacctggtgtatacgttgtctttggagcacaaaaccagttgaaacatcaaattcgtttgatgtactgaagtcagaggacgcgcagggaatggataatcttgcctgcgaagatctaaaaccagtctctgaagaagtagtggaaaatcctaccatacagaaagacgttcttgagtgtaatgtgaaaactaccgaagttgtaggagacattatacttaaaccagcaaataatagtttaaaaattacagaagaggttggccacacagatctaatggctgcttatgtagacaattctagtcttactattaagaaacctaatgaattatctagagtattaggtttgaaaacccttgctactcatggtttagctgctgttaatagtgtcccttgggatactatagctaattatgctaagccttttcttaacaaagttgttagtacaactactaacatagttacacggtgtttaaaccgtgtttgtactaattatatgccttatttctttactttattgctacaattgtgtacttttactagaagtacaaattctagaattaaagcatctatgccgactactatagcaaagaatactgttaagagtgtcggtaaattttgtctagaggcttcatttaattatttgaagtcacctaatttttctaaactgataaatattataatttggtttttactattaagtgtttgcctaggttctttaatctactcaaccgctgctttaggtgttttaatgtctaatttaggcatgccttcttactgtactggttacagagaaggctatttgaactctactaatgtcactattgcaacctactgtactggttctataccttgtagtgtttgtcttagtggtttagattctttagacacctatccttctttagaaactatacaaattaccatttcatcttttaaatgggatttaactgcttttggcttagttgcagagtggtttttggcatatattcttttcactaggtttttctatgtacttggattggctgcaatcatgcaattgtttttcagctattttgcagtacattttattagtaattcttggcttatgtggttaataattaatcttgtacaaatggccccgatttcagctatggttagaatgtacatcttctttgcatcattttattatgtatggaaaagttatgtgcatgttgtagacggttgtaattcatcaacttgtatgatgtgttacaaacgtaatagagcaacaagagtcgaatgtacaactattgttaatggtgttagaaggtccttttatgtctatgctaatggaggtaaaggcttttgcaaactacacaattggaattgtgttaattgtgatacattctgtgctggtagtacatttattagtgatgaagttgcgagagacttgtcactacagtttaaaagaccaataaatcctactgaccagtcttcttacatcgttgatagtgttacagtgaagaatggttccatccatctttactttgataaagctggtcaaaagacttatgaaagacattctctctctcattttgttaacttagacaacctgagagctaataacactaaaggttcattgcctattaatgttatagtttttgatggtaaatcaaaatgtgaagaatcatctgcaaaatcagcgtctgtttactacagtcagcttatgtgtcaacctatactgttactagatcaggcattagtgtctgatgttggtgatagtgcggaagttgcagttaaaatgtttgatgcttacgttaatacgttttcatcaacttttaacgtaccaatggaaaaactcaaaacactagttgcaactgcagaagctgaacttgcaaagaatgtgtccttagacaatgtcttatctacttttatttcagcagctcggcaagggtttgttgattcagatgtagaaactaaagatgttgttgaatgtcttaaattgtcacatcaatctgacatagaagttactggcgatagttgtaataactatatgctcacctataacaaagttgaaaacatgacaccccgtgaccttggtgcttgtattgactgtagtgcgcgtcatattaatgcgcaggtagcaaaaagtcacaacattgctttgatatggaacgttaaagatttcatgtcattgtctgaacaactacgaaaacaaatacgtagtgctgctaaaaagaataacttaccttttaagttgacatgtgcaactactagacaagttgttaatgttgtaacaacaaagatagcacttaagggtggtaaaattgttaataattggttgaagcagttaattaaagttacacttgtgttcctttttgttgctgctattttctatttaataacacctgttcatgtcatgtctaaacatactgacttttcaagtgaaatcataggatacaaggctattgatggtggtgtcactcgtgacatagcatctacagatacttgttttgctaacaaacatgctgattttgacacatggtttagccagcgtggtggtagttatactaatgacaaagcttgcccattgattgctgcagtcataacaagagaagtgggttttgtcgtgcctggtttgcctggcacgatattacgcacaactaatggtgactttttgcatttcttacctagagtttttagtgcagttggtaacatctgttacacaccatcaaaacttatagagtacactgactttgcaacatcagcttgtgttttggctgctgaatgtacaatttttaaagatgcttctggtaagccagtaccatattgttatgataccaatgtactagaaggttctgttgcttatgaaagtttacgccctgacacacgttatgtgctcatggatggctctattattcaatttcctaacacctaccttgaaggttctgttagagtggtaacaacttttgattctgagtactgtaggcacggcacttgtgaaagatcagaagctggtgtttgtgtatctactagtggtagatgggtacttaacaatgattattacagatctttaccaggagttttctgtggtgtagatgctgtaaatttacttactaatatgtttacaccactaattcaacctattggtgctttggacatatcagcatctatagtagctggtggtattgtagctatcgtagtaacatgccttgcctactattttatgaggtttagaagagcttttggtgaatacagtcatgtagttgcctttaatactttactattccttatgtcattcactgtactctgtttaacaccagtttactcattcttacctggtgtttattctgttatttacttgtacttgacattttatcttactaatgatgtttcttttttagcacatattcagtggatggttatgttcacacctttagtacctttctggataacaattgcttatatcatttgtatttccacaaagcatttctattggttctttagtaattacctaaagagacgtgtagtctttaatggtgtttcctttagtacttttgaagaagctgcgctgtgcacctttttgttaaataaagaaatgtatctaaagttgcgtagtgatgtgctattacctcttacgcaatataatagatacttagctctttataataagtacaagtattttagtggagcaatggatacaactagctacagagaagctgcttgttgtcatctcgcaaaggctctcaatgacttcagtaactcaggttctgatgttctttaccaaccaccacaaacctctatcacctcagctgttttgcagagtggttttagaaaaatggcattcccatctggtaaagttgagggttgtatggtacaagtaacttgtggtacaactacacttaacggtctttggcttgatgacgtagtttactgtccaagacatgtgatctgcacctctgaagacatgcttaaccctaattatgaagatttactcattcgtaagtctaatcataatttcttggtacaggctggtaatgttcaactcagggttattggacattctatgcaaaattgtgtacttaagcttaaggttgatacagccaatcctaagacacctaagtataagtttgttcgcattcaaccaggacagactttttcagtgttagcttgttacaatggttcaccatctggtgtttaccaatgtgctatgaggcccaatttcactattaagggttcattccttaatggttcatgtggtagtgttggttttaacatagattatgactgtgtctctttttgttacatgcaccatatggaattaccaactggagttcatgctggcacagacttagaaggtaacttttatggaccttttgttgacaggcaaacagcacaagcagctggtacggacacaactattacagttaatgttttagcttggttgtacgctgctgttataaatggagacaggtggtttctcaatcgatttaccacaactcttaatgactttaaccttgtggctatgaagtacaattatgaacctctaacacaagaccatgttgacatactaggacctctttctgctcaaactggaattgccgttttagatatgtgtgcttcattaaaagaattactgcaaaatggtatgaatggacgtaccatattgggtagtgctttattagaagatgaatttacaccttttgatgttgttagacaatgctcaggtgttactttccaaagtgcagtgaaaagaacaatcaagggtacacaccactggttgttactcacaattttgacttcacttttagttttagtccagagtactcaatggtctttgttcttttttttgtatgaaaatgcctttttaccttttgctatgggtattattgctatgtctgcttttgcaatgatgtttgtcaaacataagcatgcatttctctgtttgtttttgttaccttctcttgccactgtagcttattttaatatggtctatatgcctgctagttgggtgatgcgtattatgacatggttggatatggttgatactagtttgtctggttttaagctaaaagactgtgttatgtatgcatcagctgtagtgttactaatccttatgacagcaagaactgtgtatgatgatggtgctaggagagtgtggacacttatgaatgtcttgacactcgtttataaagtttattatggtaatgctttagatcaagccatttccatgtgggctcttataatctctgttacttctaactactcaggtgtagttacaactgtcatgtttttggccagaggtattgtttttatgtgtgttgagtattgccctattttcttcataactggtaatacacttcagtgtataatgctagtttattgtttcttaggctatttttgtacttgttactttggcctcttttgtttactcaaccgctactttagactgactcttggtgtttatgattacttagtttctacacaggagtttagatatatgaattcacagggactactcccacccaagaatagcatagatgccttcaaactcaacattaaattgttgggtgttggtggcaaaccttgtatcaaagtagccactgtacagtctaaaatgtcagatgtaaagtgcacatcagtagtcttactctcagttttgcaacaactcagagtagaatcatcatctaaattgtgggctcaatgtgtccagttacacaatgacattctcttagctaaagatactactgaagcctttgaaaaaatggtttcactactttctgttttgctttccatgcagggtgctgtagacataaacaagctttgtgaagaaatgctggacaacagggcaaccttacaagctatagcctcagagtttagttcccttccatcatatgcagcttttgctactgctcaagaagcttatgagcaggctgttgctaatggtgattctgaagttgttcttaaaaagttgaagaagtctttgaatgtggctaaatctgaatttgaccgtgatgcagccatgcaacgtaagttggaaaagatggctgatcaagctatgacccaaatgtataaacaggctagatctgaggacaagagggcaaaagttactagtgctatgcagacaatgcttttcactatgcttagaaagttggataatgatgcactcaacaacattatcaacaatgcaagagatggttgtgttcccttgaacataatacctcttacaacagcagccaaactaatggttgtcataccagactataacacatataaaaatacgtgtgatggtacaacatttacttatgcatcagcattgtgggaaatccaacaggttgtagatgcagatagtaaaattgttcaacttagtgaaattagtatggacaattcacctaatttagcatggcctcttattgtaacagctttaagggccaattctgctgtcaaattacagaataatgagcttagtcctgttgcactacgacagatgtcttgtgctgccggtactacacaaactgcttgcactgatgacaatgcgttagcttactacaacacaacaaagggaggtaggtttgtacttgcactgttatccgatttacaggatttgaaatgggctagattccctaagagtgatggaactggtactatctatacagaactggaaccaccttgtaggtttgttacagacacacctaaaggtcctaaagtgaagtatttatactttattaaaggattaaacaacctaaatagaggtatggtacttggtagtttagctgccacagtacgtctacaagctggtaatgcaacagaagtgcctgccaattcaactgtattatctttctgtgcttttgctgtagatgctgctaaagcttacaaagattatctagctagtgggggacaaccaatcactaattgtgttaagatgttgtgtacacacactggtactggtcaggcaataacagttacaccggaagccaatatggatcaagaatcctttggtggtgcatcgtgttgtctgtactgccgttgccacatagatcatccaaatcctaaaggattttgtgacttaaaaggtaagtatgtacaaatacctacaacttgtgctaatgaccctgtgggttttacacttaaaaacacagtctgtaccgtctgcggtatgtggaaaggttatggctgtagttgtgatcaactccgcgaacccatgcttcagtcagctgatgcacaatcgtttttaaacgggtttgcggtgtaagtgcagcccgtcttacaccgtgcggcacaggcactagtactgatgtcgtatacagggcttttgacatctacaatgataaagtagctggttttgctaaattcctaaaaactaattgttgtcgcttccaagaaaaggacgaagatgacaatttaattgattcttactttgtagttaagagacacactttctctaactaccaacatgaagaaacaatttataatttacttaaggattgtccagctgttgctaaacatgacttctttaagtttagaatagacggtgacatggtaccacatatatcacgtcaacgtcttactaaatacacaatggcagacctcgtctatgctttaaggcattttgatgaaggtaattgtgacacattaaaagaaatacttgtcacatacaattgttgtgatgatgattatttcaataaaaaggactggtatgattttgtagaaaacccagatatattacgcgtatacgccaacttaggtgaacgtgtacgccaagctttgttaaaaacagtacaattctgtgatgccatgcgaaatgctggtattgttggtgtactgacattagataatcaagatctcaatggtaactggtatgatttcggtgatttcatacaaaccacgccaggtagtggagttcctgttgtagattcttattattcattgttaatgcctatattaaccttgaccagggctttaactgcagagtcacatgttgacactgacttaacaaagccttacattaagtgggatttgttaaaatatgacttcacggaagagaggttaaaactctttgaccgttattttaaatattgggatcagacataccacccaaattgtgttaactgtttggatgacagatgcattctgcattgtgcaaactttaatgttttattctctacagtgttcccacctacaagttttggaccactagtgagaaaaatatttgttgatggtgttccatttgtagtttcaactggataccacttcagagagctaggtgttgtacataatcaggatgtaaacttacatagctctagacttagttttaaggaattacttgtgtatgctgctgaccctgctatgcacgctgcttctggtaatctattactagataaacgcactacgtgcttttcagtagctgcacttactaacaatgttgcttttcaaactgtcaaacccggtaattttaacaaagacttctatgactttgctgtgtctaagggtttctttaaggaaggaagttctgttgaattaaaacacttcttctttgctcaggatggtaatgctgctatcagcgattatgactactatcgttataatctaccaacaatgtgtgatatcagacaactactatttgtagttgaagttgttgataagtactttgattgttacgatggtggctgtattaatgctaaccaagtcatcgtcaacaacctagacaaatcagctggttttccatttaataaatggggtaaggctagactttattatgattcaatgagttatgaggatcaagatgcacttttcgcatatacaaaacgtaatgtcatccctactataactcaaatgaatcttaagtatgccattagtgcaaagaatagagctcgcaccgtagctggtgtctctatctgtagtactatgaccaatagacagtttcatcaaaaattattgaaatcaatagccgccactagaggagctactgtagtaattggaacaagcaaattctatggtggttggcacaacatgttaaaaactgtttatagtgatgtagaaaaccctcaccttatgggttgggattatcctaaatgtgatagagccatgcctaacatgcttagaattatggcctcacttgttcttgctcgcaaacatacaacgtgttgtagcttgtcacaccgtttctatagattagctaatgagtgtgctcaagtattgagtgaaatggtcatgtgtggcggttcactatatgttaaaccaggtggaacctcatcaggagatgccacaactgcttatgctaatagtgtttttaacatttgtcaagctgtcacggccaatgttaatgcacttttatctactgatggtaacaaaattgccgataagtatgtccgcaatttacaacacagactttatgagtgtctctatagaaatagagatgttgacacagactttgtgaatgagttttacgcatatttgcgtaaacatttctcaatgatgatactctctgacgatgctgttgtgtgtttcaatagcacttatgcatctcaaggtctagtggctagcataaagaactttaagtcagttctttattatcaaaacaatgtttttatgtctgaagcaaaatgttggactgagactgaccttactaaaggacctcatgaattttgctctcaacatacaatgctagttaaacagggtgatgattatgtgtaccttccttacccagatccatcaagaatcctaggggccggctgttttgtagatgatatcgtaaaaacagatggtacacttatgattgaacggttcgtgtctttagctatagatgcttacccacttactaaacatcctaatcaggagtatgctgatgtctttcatttgtacttacaatacataagaaagctacatgatgagttaacaggacacatgttagacatgtattctgttatgcttactaatgataacacttcaaggtattgggaacctgagttttatgaggctatgtacacaccgcatacagtcttacaggctgttggggcttgtgttctttgcaattcacagacttcattaagatgtggtgcttgcatacgtagaccattcttatgttgtaaatgctgttacgaccatgtcatatcaacatcacataaattagtcttgtctgttaatccgtatgtttgcaatgctccaggttgtgatgtcacagatgtgactcaactttacttaggaggtatgagctattattgtaaatcacataaaccacccattagttttccattgtgtgctaatggacaagtttttggtttatataaaaatacatgtgttggtagcgataatgttactgactttaatgcaattgcaacatgtgactggacaaatgctggtgattacattttagctaacacctgtactgaaagactcaagctttttgcagcagaaacgctcaaagctactgaggagacatttaaactgtcttatggtattgctactgtacgtgaagtgctgtctgacagagaattacatctttcatgggaagttggtaaacctagaccaccacttaaccgaaattatgtctttactggttatcgtgtaactaaaaacagtaaagtacaaataggagagtacacctttgaaaaaggtgactatggtgatgctgttgtttaccgaggtacaacaacttacaaattaaatgttggtgattattttgtgctgacatcacatacagtaatgccattaagtgcacctacactagtgccacaagagcactatgttagaattactggcttatacccaacactcaatatctcagatgagttttctagcaatgttgcaaattatcaaaaggttggtatgcaaaagtattctacactccagggaccacctggtactggtaagagtcattttgctattggcctagctctctactacccttctgctcgcatagtgtatacagcttgctctcatgccgctgttgatgcactatgtgagaaggcattaaaatatttgcctatagataaatgtagtagaattatacctgcacgtgctcgtgtagagtgttttgataaattcaaagtgaattcaacattagaacagtatgtcttttgtactgtaaatgcattgcctgagacgacagcagatatagttgtctttgatgaaatttcaatggccacaaattatgatttgagtgttgtcaatgccagattacgtgctaagcactatgtgtacattggcgaccctgctcaattacctgcaccacgcacattgctaactaagggcacactagaaccagaatatttcaattcagtgtgtagacttatgaaaactataggtccagacatgttcctcggaacttgtcggcgttgtcctgctgaaattgttgacactgtgagtgctttggtttatgataataagcttaaagcacataaagacaaatcagctcaatgctttaaaatgttttataagggtgttatcacgcatgatgtttcatctgcaattaacaggccacaaataggcgtggtaagagaattccttacacgtaaccctgcttggagaaaagctgtctttatttcaccttataattcacagaatgctgtagcctcaaagattttgggactaccaactcaaactgttgattcatcacagggctcagaatatgactatgtcatattcactcaaaccactgaaacagctcactcttgtaatgtaaacagatttaatgttgctattaccagagcaaaagtaggcatactttgcataatgtctgatagagacctttatgacaagttgcaatttacaagtcttgaaattccacgtaggaatgtggcaactttacaagctgaaaatgtaacaggactctttaaagattgtagtaaggtaatcactgggttacatcctacacaggcacctacacacctcagtgttgacactaaattcaaaactgaaggtttatgtgttgacatacctggcatacctaaggacatgacctatagaagactcatctctatgatgggttttaaaatgaattatcaagttaatggttaccctaacatgtttatcacccgcgaagaagctataagacatgtacgtgcatggattggcttcgatgtcgaggggtgtcatgctactagagaagctgttggtaccaatttacctttacagctaggtttttctacaggtgttaacctagttgctgtacctacaggttatgttgatacacctaataatacagatttttccagagttagtgctaaaccaccgcctggagatcaatttaaacacctcataccacttatgtacaaaggacttccttggaatgtagtgcgtataaagattgtacaaatgttaagtgacacacttaaaaatctctctgacagagtcgtatttgtcttatgggcacatggctttgagttgacatctatgaagtattttgtgaaaataggacctgagcgcacctgttgtctatgtgatagacgtgccacatgcttttccactgcttcagacacttatgcctgttggcatcattctattggatttgattacgtctataatccgtttatgattgatgttcaacaatggggttttacaggtaacctacaaagcaaccatgatctgtattgtcaagtccatggtaatgcacatgtagctagttgtgatgcaatcatgactaggtgtctagctgtccacgagtgctttgttaagcgtgttgactggactattgaatatcctataattggtgatgaactgaagattaatgcggcttgtagaaaggttcaacacatggttgttaaagctgcattattagcagacaaattcccagttcttcacgacattggtaaccctaaagctattaagtgtgtacctcaagctgatgtagaatggaagttctatgatgcacagccttgtagtgacaaagcttataaaatagaagaattattctattcttatgccacacattctgacaaattcacagatggtgtatgcctattttggaattgcaatgtcgatagatatcctgctaattccattgtttgtagatttgacactagagtgctatctaaccttaacttgcctggttgtgatggtggcagtttgtatgtaaataaacatgcattccacacaccagcttttgataaaagtgcttttgttaatttaaaacaattaccatttttctattactctgacagtccatgtgagtctcatggaaaacaagtagtgtcagatatagattatgtaccactaaagtctgctacgtgtataacacgttgcaatttaggtggtgctgtctgtagacatcatgctaatgagtacagattgtatctcgatgcttataacatgatgatctcagctggctttagcttgtgggtttacaaacaatttgatacttataacctctggaacacttttacaagacttcagagtttagaaaatgtggcttttaatgttgtaaataagggacactttgatggacaacagggtgaagtaccagtttctatcattaataacactgtttacacaaaagttgatggtgttgatgtagaattgtttgaaaataaaacaacattacctgttaatgtagcatttgagctttgggctaagcgcaacattaaaccagtaccagaggtgaaaatactcaataatttgggtgtggacattgctgctaatactgtgatctgggactacaaaagagatgctccagcacatatatctactattggtgtttgttctatgactgacatagccaagaaaccaactgaaacgatttgtgcaccactcactgtcttttttgatggtagagttgatggtcaagtagacttatttagaaatgcccgtaatggtgttcttattacagaaggtagtgttaaaggtttacaaccatctgtaggtcccaaacaagctagtcttaatggagtcacattaattggagaagccgtaaaaacacagttcaattattataagaaagttgatggtgttgtccaacaattacctgaaacttactttactcagagtagaaatttacaagaatttaaacccaggagtcaaatggaaattgatttcttagaattagctatggatgaattcattgaacggtataaattagaaggctatgccttcgaacatatcgtttatggagattttagtcatagtcagttaggtggtttacatctactgattggactagctaaacgttttaaggaatcaccttttgaattagaagattttattcctatggacagtacagttaaaaactatttcataacagatgcgcaaacaggttcatctaagtgtgtgtgttctgttattgatttattacttgatgattttgttgaaataataaaatcccaagatttatctgtagtttctaaggttgtcaaagtgactattgactatacagaaatttcatttatgctttggtgtaaagatggccatgtagaaacattttacccaaaattacaatctagtcaagcgtggcaaccgggtgttgctatgcctaatctttacaaaatgcaaagaatgctattagaaaagtgtgaccttcaaaattatggtgatagtgcaacattacctaaaggcataatgatgaatgtcgcaaaatatactcaactgtgtcaatatttaaacacattaacattagctgtaccctataatatgagagttatacattttggtgctggttctgataaaggagttgcaccaggtacagctgttttaagacagtggttgcctacgggtacgctgcttgtcgattcagatcttaatgactttgtctctgatgcagattcaactttgattggtgattgtgcaactgtacatacagctaataaatgggatctcattattagtgatatgtacgaccctaagactaaaaatgttacaaaagaaaatgactctaaagagggttttttcacttacatttgtgggtttatacaacaaaagctagctcttggaggttccgtggctataaagataacagaacattcttggaatgctgatctttataagctcatgggacacttcgcatggtggacagcctttgttactaatgtgaatgcgtcatcatctgaagcatttttaattggatgtaattatcttggcaaaccacgcgaacaaatagatggttatgtcatgcatgcaaattacatattttggaggaatacaaatccaattcagttgtcttcctattctttatttgacatgagtaaatttccccttaaattaaggggtactgctgttatgtctttaaaagaaggtcaaatcaatgatatgattttatctcttcttagtaaaggtagacttataattagagaaaacaacagagttgttatttctagtgatgttcttgttaacaactaaacgaacaatgtttgtttttcttgttttattgccactagtctctagtcagtgtgttaatcttacaaccagaactcaattaccccctgcatacactaattctttcacacgtggtgtttattaccctgacaaagttttcagatcctcagttttacattcaactcaggacttgttcttacctttcttttccaatgttacttggttccatgctatacatgtctctgggaccaatggtactaagaggtttgataaccctgtcctaccatttaatgatggtgtttattttgcttccactgagaagtctaacataataagaggctggatttttggtactactttagattcgaagacccagtccctacttattgttaataacgctactaatgttgttattaaagtctgtgaatttcaattttgtaatgatccatttttgggtgtttattaccacaaaaacaacaaaagttggatggaaagtgagttcagagtttattctagtgcgaataattgcacttttgaatatgtctctcagccttttcttatggaccttgaaggaaaacagggtaatttcaaaaatcttagggaatttgtgtttaagaatattgatggttattttaaaatatattctaagcacacgcctattaatttagtgcgtgatctccctcagggtttttcggctttagaaccattggtagatttgccaataggtattaacatcactaggtttcaaactttacttgctttacatagaagttatttgactcctggtgattcttcttcaggttggacagctggtgctgcagcttattatgtgggttatcttcaacctaggacttttctattaaaatataatgaaaatggaaccattacagatgctgtagactgtgcacttgaccctctctcagaaacaaagtgtacgttgaaatccttcactgtagaaaaaggaatctatcaaacttctaactttagagtccaaccaacagaatctattgttagatttcctaatattacaaacttgtgcccttttggtgaagtttttaacgccaccagatttgcatctgtttatgcttggaacaggaagagaatcagcaactgtgttgctgattattctgtcctatataattccgcatcattttccacttttaagtgttatggagtgtctcctactaaattaaatgatctctgctttactaatgtctatgcagattcatttgtaattagaggtgatgaagtcagacaaatcgctccagggcaaactggaaagattgctgattataattataaattaccagatgattttacaggctgcgttatagcttggaattctaacaatcttgattctaaggttggtggtaattataattacctgtatagattgtttaggaagtctaatctcaaaccttttgagagagatatttcaactgaaatctatcaggccggtagcacaccttgtaatggtgttgaaggttttaattgttactttcctttacaatcatatggtttccaacccactaatggtgttggttaccaaccatacagagtagtagtactttcttttgaacttctacatgcaccagcaactgtttgtggacctaaaaagtctactaatttggttaaaaacaaatgtgtcaatttcaacttcaatggtttaacaggcacaggtgttcttactgagtctaacaaaaagtttctgcctttccaacaatttggcagagacattgctgacactactgatgctgtccgtgatccacagacacttgagattcttgacattacaccatgttcttttggtggtgtcagtgttataacaccaggaacaaatacttctaaccaggttgctgttctttatcaggatgttaactgcacagaagtccctgttgctattcatgcagatcaacttactcctacttggcgtgtttattctacaggttctaatgtttttcaaacacgtgcaggctgtttaataggggctgaacatgtcaacaactcatatgagtgtgacatacccattggtgcaggtatatgcgctagttatcagactcagactaattctcctcggcgggcacgtagtgtagctagtcaatccatcattgcctacactatgtcacttggtgcagaaaattcagttgcttactctaataactctattgccatacccacaaattttactattagtgttaccacagaaattctaccagtgtctatgaccaagacatcagtagattgtacaatgtacatttgtggtgattcaactgaatgcagcaatcttttgttgcaatatggcagtttttgtacacaattaaaccgtgctttaactggaatagctgttgaacaagacaaaaacacccaagaagtttttgcacaagtcaaacaaatttacaaaacaccaccaattaaagattttggtggttttaatttttcacaaatattaccagatccatcaaaaccaagcaagaggtcatttattgaagatctacttttcaacaaagtgacacttgcagatgctggcttcatcaaacaatatggtgattgccttggtgatattgctgctagagacctcatttgtgcacaaaagtttaacggccttactgttttgccacctttgctcacagatgaaatgattgctcaatacacttctgcactgttagcgggtacaatcacttctggttggacctttggtgcaggtgctgcattacaaataccatttgctatgcaaatggcttataggtttaatggtattggagttacacagaatgttctctatgagaaccaaaaattgattgccaaccaatttaatagtgctattggcaaaattcaagactcactttcttccacagcaagtgcacttggaaaacttcaagatgtggtcaaccaaaatgcacaagctttaaacacgcttgttaaacaacttagctccaattttggtgcaatttcaagtgttttaaatgatatcctttcacgtcttgacaaagttgaggctgaagtgcaaattgataggttgatcacaggcagacttcaaagtttgcagacatatgtgactcaacaattaattagagctgcagaaatcagagcttctgctaatcttgctgctactaaaatgtcagagtgtgtacttggacaatcaaaaagagttgatttttgtggaaagggctatcatcttatgtccttccctcagtcagcacctcatggtgtagtcttcttgcatgtgacttatgtccctgcacaagaaaagaacttcacaactgctcctgccatttgtcatgatggaaaagcacactttcctcgtgaaggtgtctttgtttcaaatggcacacactggtttgtaacacaaaggaatttttatgaaccacaaatcattactacagacaacacatttgtgtctggtaactgtgatgttgtaataggaattgtcaacaacacagtttatgatcctttgcaacctgaattagactcattcaaggaggagttagataaatattttaagaatcatacatcaccagatgttgatttaggtgacatctctggcattaatgcttcagttgtaaacattcaaaaagaaattgaccgcctcaatgaggttgccaagaatttaaatgaatctctcatcgatctccaagaacttggaaagtatgagcagtatataaaatggccatggtacatttggctaggttttatagctggcttgattgccatagtaatggtgacaattatgctttgctgtatgaccagttgctgtagttgtctcaagggctgttgttcttgtggatcctgctgcaaatttgatgaagacgactctgagccagtgctcaaaggagtcaaattacattacacataaacgaacttatggatttgtttatgagaatcttcacaattggaactgtaactttgaagcaaggtgaaatcaaggatgctactccttcagattttgttcgcgctactgcaacgataccgatacaagcctcactccctttcggatggcttattgttggcgttgcacttcttgctgtttttcagagcgcttccaaaatcataaccctcaaaaagagatggcaactagcactctccaagggtgttcactttgtttgcaacttgctgttgttgtttgtaacagtttactcacaccttttgctcgttgctgctggccttgaagccccttttctctatctttatgctttagtctacttcttgcagagtataaactttgtaagaataataatgaggctttggctttgctggaaatgccgttccaaaaacccattactttatgatgccaactattttctttgctggcatactaattgttacgactattgtataccttacaatagtgtaacttcttcaattgtcattacttcaggtgatggcacaacaagtcctatttctgaacatgactaccagattggtggttatactgaaaaatgggaatctggagtaaaagactgtgttgtattacacagttacttcacttcagactattaccagctgtactcaactcaattgagtacagacactggtgttgaacatgttaccttcttcatctacaataaaattgttgatgagcctgaagaacatgtccaaattcacacaatcgacggttcatccggagttgttaatccagtaatggaaccaatttatgatgaaccgacgacgactactagcgtgcctttgtaagcacaagctgatgagtacgaacttatgtactcattcgtttcggaagagacaggtacgttaatagttaatagcgtacttctttttcttgctttcgtggtattcttgctagttacactagccatccttactgcgcttcgattgtgtgcgtactgctgcaatattgttaacgtgagtcttgtaaaaccttctttttacgtttactctcgtgttaaaaatctgaattcttctagagttcctgatcttctggtctaaacgaactaaatattatattagtttttctgtttggaactttaattttagccatggcagattccaacggtactattaccgttgaagagcttaaaaagctccttgaacaatggaacctagtaataggtttcctattccttacatggatttgtcttctacaatttgcctatgccaacaggaataggtttttgtatataattaagttaattttcctctggctgttatggccagtaactttagcttgttttgtgcttgctgctgtttacagaataaattggatcaccggtggaattgctatcgcaatggcttgtcttgtaggcttgatgtggctcagctacttcattgcttctttcagactgtttgcgcgtacgcgttccatgtggtcattcaatccagaaactaacattcttctcaacgtgccactccatggcactattctgaccagaccgcttctagaaagtgaactcgtaatcggagctgtgatccttcgtggacatcttcgtattgctggacaccatctaggacgctgtgacatcaaggacctgcctaaagaaatcactgttgctacatcacgaacgctttcttattacaaattgggagcttcgcagcgtgtagcaggtgactcaggttttgctgcatacagtcgctacaggattggcaactataaattaaacacagaccattccagtagcagtgacaatattgctttgcttgtacagtaagtgacaacagatgtttcatctcgttgactttcaggttactatagcagagatattactaattattatgaggacttttaaagtttccatttggaatcttgattacatcataaacctcataattaaaaatttatctaagtcactaactgagaataaatattctcaattagatgaagagcaaccaatggagattgattaaacgaacatgaaaattattcttttcttggcactgataacactcgctacttgtgagctttatcactaccaagagtgtgttagaggtacaacagtacttttaaaagaaccttgctcttctggaacatacgagggcaattcaccatttcatcctctagctgataacaaatttgcactgacttgctttagcactcaatttgcttttgcttgtcctgacggcgtaaaacacgtctatcagttacgtgccagatcagtttcacctaaactgttcatcagacaagaggaagttcaagaactttactctccaatttttcttattgttgcggcaatagtgtttataacactttgcttcacactcaaaagaaagacagaatgattgaactttcattaattgacttctatttgtgctttttagcctttctgctattccttgttttaattatgcttattatcttttggttctcacttgaactgcaagatcataatgaaacttgtcacgcctaaacgaacatgaaatttcttgttttcttaggaatcatcacaactgtagctgcatttcaccaagaatgtagtttacagtcatgtactcaacatcaaccatatgtagttgatgacccgtgtcctattcacttctattctaaatggtatattagagtaggagctagaaaatcagcacctttaattgaattgtgcgtggatgaggctggttctaaatcacccattcagtacatcgatatcggtaattatacagtttcctgtttaccttttacaattaattgccaggaacctaaattgggtagtcttgtagtgcgttgttcgttctatgaagactttttagagtatcatgacgttcgtgttgttttagatttcatctaaacgaacaaactaaaatgtctgataatggaccccaaaatcagcgaaatgcaccccgcattacgtttggtggaccctcagattcaactggcagtaaccagaatggagaacgcagtggggcgcgatcaaaacaacgtcggccccaaggtttacccaataatactgcgtcttggttcaccgctctcactcaacatggcaaggaagaccttaaattccctcgaggacaaggcgttccaattaacaccaatagcagtccagatgaccaaattggctactaccgaagagctaccagacgaattcgtggtggtgacggtaaaatgaaagatctcagtccaagatggtatttctactacctaggaactgggccagaagctggacttccctatggtgctaacaaagacggcatcatatgggttgcaactgagggagccttgaatacaccaaaagatcacattggcacccgcaatcctgctaacaatgctgcaatcgtgctacaacttcctcaaggaacaacattgccaaaaggcttctacgcagaagggagcagaggcggcagtcaagcctcttctcgttcctcatcacgtagtcgcaacagttcaagaaattcaactccaggcagcagtaggggaacttctcctgctagaatggctggcaatggcggtgatgctgctcttgctttgctgctgcttgacagattgaaccagcttgagagcaaaatgtctggtaaaggccaacaacaacaaggccaaactgtcactaagaaatctgctgctgaggcttctaagaagcctcggcaaaaacgtactgccactaaagcatacaatgtaacacaagctttcggcagacgtggtccagaacaaacccaaggaaattttggggaccaggaactaatcagacaaggaactgattacaaacattggccgcaaattgcacaatttgcccccagcgcttcagcgttcttcggaatgtcgcgcattggcatggaagtcacaccttcgggaacgtggttgacctacacaggtgccatcaaattggatgacaaagatccaaatttcaaagatcaagtcattttgctgaataagcatattgacgcatacaaaacattcccaccaacagagcctaaaaaggacaaaaagaagaaggctgatgaaactcaagccttaccgcagagacagaagaaacagcaaactgtgactcttcttcctgctgcagatttggatgatttctccaaacaattgcaacaatccatgagcagtgctgactcaactcaggcctaaactcatgcagaccacacaaggcagatgggctatataaacgttttcgcttttccgtttacgatatatagtctactcttgtgcagaatgaattctcgtaactacatagcacaagtagatgtagttaactttaatctcacatagcaatctttaatcagtgtgtaacattagggaggacttgaaagagccaccacattttcaccgaggccacgcggagtacgatcgagtgtacagtgaacaatgctagggagagctgcctatatggaagagccctaatgtgtaaaattaattttagtagtgctatccccatgtgattttaatagcttcttaggagaatgacaaaaaaaaaaaaaaaaaaaaaaaaaaaaaaaaa

SEQ ID NO: 2 - DNA, 28492 bp, Artificial Sequence
  T7-scv2-luc-GFP replicon
taatacgactcactatagattaaaggtttataccttcccaggtaacaaaccaaccaactttcgatctcttgtagatctgttctctaaacgaactttaaaatctgtgtggctgtcactcggctgcatgcttagtgcactcacgcagtataattaataactaattactgtcgttgacaggacacgagtaactcgtctatcttctgcaggctgcttacggtttcgtccgtgttgcagccgatcatcagcacatctaggtttcgtccgggtgtgaccgaaaggtaagatggagagccttgtccctggtttcaacgagaaaacacacgtccaactcagtttgcctgttttacaggttcgcgacgtgctcgtacgtggctttggagactccgtggaggaggtcttatcagaggcacgtcaacatcttaaagatggcacttgtggcttagtagaagttgaaaaaggcgttttgcctcaacttgaacagccctatgtgttcatcaaacgttcggatgctcgaactgcacctcatggtcatgttatggttgagctggtagcagaactcgaaggcattcagtacggtcgtagtggtgagacacttggtgtccttgtccctcatgtgggcgaaataccagtggcttaccgcaaggttcttcttcgtaagaacggtaataaaggagctggtggccatagttacggcgccgatctaaagtcatttgacttaggcgacgagcttggcactgatccttatgaagattttcaagaaaactggaacactaaacatagcagtggtgttacccgtgaactcatgcgtgagcttaacggaggggcatacactcgctatgtcgataacaacttctgtggccctgatggctaccctcttgagtgcattaaagaccttctagcacgtgctggtaaagcttcatgcactttgtccgaacaactggactttattgacactaagaggggtgtatactgctgccgtgaacatgagcatgaaattgcttggtacacggaacgttctgaaaagagctatgaattgcagacaccttttgaaattaaattggcaaagaaatttgacaccttcaatggggaatgtccaaattttgtatttcccttaaattccataatcaagactattcaaccaagggttgaaaagaaaaagcttgatggctttatgggtagaattcgatctgtctatccagttgcgtcaccaaatgaatgcaaccaaatgtgcctttcaactctcatgaagtgtgatcattgtggtgaaacttcatggcagacgggcgattttgttaaagccacttgcgaattttgtggcactgagaatttgactaaagaaggtgccactacttgtggttacttaccccaaaatgctgttgttaaaatttattgtccagcatgtcacaattcagaagtaggacctgagcatagtcttgccgaataccataatgaatctggcttgaaaaccattcttcgtaagggtggtcgcactattgcctttggaggctgtgtgttctcttatgttggttgccataacaagtgtgcctattgggttccacgtgctagcgctaacataggttgtaaccatacaggtgttgttggagaaggttccgaaggtcttaatgacaaccttcttgaaatactccaaaaagagaaagtcaacatcaatattgttggtgactttaaacttaatgaagagatcgccattattttggcatctttttctgcttccacaagtgcttttgtggaaactgtgaaaggtttggattataaagcattcaaacaaattgttgaatcctgtggtaattttaaagttacaaaaggaaaagctaaaaaaggtgcctggaatattggtgaacagaaatcaatactgagtcctctttatgcatttgcatcagaggctgctcgtgttgtacgatcaattttctcccgcactcttgaaactgctcaaaattctgtgcgtgttttacagaaggccgctataacaatactagatggaatttcacagtattcactgagactcattgatgctatgatgttcacatctgatttggctactaacaatctagttgtaatggcctacattacaggtggtgttgttcagttgacttcgcagtggctaactaacatctttggcactgtttatgaaaaactcaaacccgtccttgattggcttgaagagaagtttaaggaaggtgtagagtttcttagagacggttgggaaattgttaaatttatctcaacctgtgcttgtgaaattgtcggtggacaaattgtcacctgtgcaaaggaaattaaggagagtgttcagacattctttaagcttgtaaataaatttttggctttgtgtgctgactctatcattattggtggagctaaacttaaagccttgaatttaggtgaaacatttgtcacgcactcaaagggattgtacagaaagtgtgttaaatccagagaagaaactggcctactcatgcctctaaaagccccaaaagaaattatcttcttagagggagaaacacttcccacagaagtgttaacagaggaagttgtcttgaaaactggtgatttacaaccattagaacaacctactagtgaagctgttgaagctccattggttggtacaccagtttgtattaacgggcttatgttgctcgaaatcaaagacacagaaaagtactgtgcccttgcacctaatatgatggtaacaaacaataccttcacactcaaaggcggtgcaccaacaaaggttacttttggtgatgacactgtgatagaagtgcaaggttacaagagtgtgaatatcacttttgaacttgatgaaaggattgataaagtacttaatgagaagtgctctgcctatacagttgaactcggtacagaagtaaatgagttcgcctgtgttgtggcagatgctgtcataaaaactttgcaaccagtatctgaattacttacaccactgggcattgatttagatgagtggagtatggctacatactacttatttgatgagtctggtgagtttaaattggcttcacatatgtattgttctttctaccctccagatgaggatgaagaagaaggtgattgtgaagaagaagagtttgagccatcaactcaatatgagtatggtactgaagatgattaccaaggtaaacctttggaatttggtgccacttctgctgctcttcaacctgaagaagagcaagaagaagattggttagatgatgatagtcaacaaactgttggtcaacaagacggcagtgaggacaatcagacaactactattcaaacaattgttgaggttcaacctcaattagagatggaacttacaccagttgttcagactattgaagtgaatagttttagtggttatttaaaacttactgacaatgtatacattaaaaatgcagacattgtggaagaagctaaaaaggtaaaaccaacagtggttgttaatgcagccaatgtttaccttaaacatggaggaggtgttgcaggagccttaaataaggctactaacaatgccatgcaagttgaatctgatgattacatagctactaatggaccacttaaagtgggtggtagttgtgttttaagcggacacaatcttgctaaacactgtcttcatgttgtcggcccaaatgttaacaaaggtgaagacattcaacttcttaagagtgcttatgaaaattttaatcagcacgaagttctacttgcaccattattatcagctggtatttttggtgctgaccctatacattctttaagagtttgtgtagatactgttcgcacaaatgtctacttagctgtctttgataaaaatctctatgacaaacttgtttcaagctttttggaaatgaagagtgaaaagcaagttgaacaaaagatcgctgagattcctaaagaggaagttaagccatttataactgaaagtaaaccttcagttgaacagagaaaacaagatgataagaaaatcaaagcttgtgttgaagaagttacaacaactctggaagaaactaagttcctcacagaaaacttgttactttatattgacattaatggcaatcttcatccagattctgccactcttgttagtgacattgacatcactttcttaaagaaagatgctccatatatagtgggtgatgttgttcaagagggtgttttaactgctgtggttatacctactaaaaaggctggtggcactactgaaatgctagcgaaagctttgagaaaagtgccaacagacaattatataaccacttacccgggtcagggtttaaatggttacactgtagaggaggcaaagacagtgcttaaaaagtgtaaaagtgccttttacattctaccatctattatctctaatgagaagcaagaaattcttggaactgtttcttggaatttgcgagaaatgcttgcacatgcagaagaaacacgcaaattaatgcctgtctgtgtggaaactaaagccatagtttcaactatacagcgtaaatataagggtattaaaatacaagagggtgtggttgattatggtgctagattttacttttacaccagtaaaacaactgtagcgtcacttatcaacacacttaacgatctaaatgaaactcttgttacaatgccacttggctatgtaacacatggcttaaatttggaagaagctgctcggtatatgagatctctcaaagtgccagctacagtttctgtttcttcacctgatgctgttacagcgtataatggttatcttacttcttcttctaaaacacctgaagaacattttattgaaaccatctcacttgctggttcctataaagattggtcctattctggacaatctacacaactaggtatagaatttcttaagagaggtgataaaagtgtatattacactagtaatcctaccacattccacctagatggtgaagttatcacctttgacaatcttaagacacttctttctttgagagaagtgaggactattaaggtgtttacaacagtagacaacattaacctccacacgcaagttgtggacatgtcaatgacatatggacaacagtttggtccaacttatttggatggagctgatgttactaaaataaaacctcataattcacatgaaggtaaaacattttatgttttacctaatgatgacactctacgtgttgaggcttttgagtactaccacacaactgatcctagttttctgggtaggtacatgtcagcattaaatcacactaaaaagtggaaatacccacaagttaatggtttaacttctattaaatgggcagataacaactgttatcttgccactgcattgttaacactccaacaaatagagttgaagtttaatccacctgctctacaagatgcttattacagagcaagggctggtgaagctgctaacttttgtgcacttatcttagcctactgtaataagacagtaggtgagttaggtgatgttagagaaacaatgagttacttgtttcaacatgccaatttagattcttgcaaaagagtcttgaacgtggtgtgtaaaacttgtggacaacagcagacaacccttaagggtgtagaagctgttatgtacatgggcacactttcttatgaacaatttaagaaaggtgttcagataccttgtacgtgtggtaaacaagctacaaaatatctagtacaacaggagtcaccttttgttatgatgtcagcaccacctgctcagtatgaacttaagcatggtacatttacttgtgctagtgagtacactggtaattaccagtgtggtcactataaacatataacttctaaagaaactttgtattgcatagacggtgctttacttacaaagtcctcagaatacaaaggtcctattacggatgttttctacaaagaaaacagttacacaacaaccataaaaccagttacttataaattggatggtgttgtttgtacagaaattgaccctaagttggacaattattataagaaagacaattcttatttcacagagcaaccaattgatcttgtaccaaaccaaccatatccaaacgcaagcttcgataattttaagtttgtatgtgataatatcaaatttgctgatgatttaaaccagttaactggttataagaaacctgcttcaagagagcttaaagttacatttttccctgacttaaatggtgatgtggtggctattgattataaacactacacaccctcttttaagaaaggagctaaattgttacataaacctattgtttggcatgttaacaatgcaactaataaagccacgtataaaccaaatacctggtgtatacgttgtctttggagcacaaaaccagttgaaacatcaaattcgtttgatgtactgaagtcagaggacgcgcagggaatggataatcttgcctgcgaagatctaaaaccagtctctgaagaagtagtggaaaatcctaccatacagaaagacgttcttgagtgtaatgtgaaaactaccgaagttgtaggagacattatacttaaaccagcaaataatagtttaaaaattacagaagaggttggccacacagatctaatggctgcttatgtagacaattctagtcttactattaagaaacctaatgaattatctagagtattaggtttgaaaacccttgctactcatggtttagctgctgttaatagtgtcccttgggatactatagctaattatgctaagccttttcttaacaaagttgttagtacaactactaacatagttacacggtgtttaaaccgtgtttgtactaattatatgccttatttctttactttattgctacaattgtgtacttttactagaagtacaaattctagaattaaagcatctatgccgactactatagcaaagaatactgttaagagtgtcggtaaattttgtctagaggcttcatttaattatttgaagtcacctaatttttctaaactgataaatattataatttggtttttactattaagtgtttgcctaggttctttaatctactcaaccgctgctttaggtgttttaatgtctaatttaggcatgccttcttactgtactggttacagagaaggctatttgaactctactaatgtcactattgcaacctactgtactggttctataccttgtagtgtttgtcttagtggtttagattctttagacacctatccttctttagaaactatacaaattaccatttcatcttttaaatgggatttaactgcttttggcttagttgcagagtggtttttggcatatattcttttcactaggtttttctatgtacttggattggctgcaatcatgcaattgtttttcagctattttgcagtacattttattagtaattcttggcttatgtggttaataattaatcttgtacaaatggccccgatttcagctatggttagaatgtacatcttctttgcatcattttattatgtatggaaaagttatgtgcatgttgtagacggttgtaattcatcaacttgtatgatgtgttacaaacgtaatagagcaacaagagtcgaatgtacaactattgttaatggtgttagaaggtccttttatgtctatgctaatggaggtaaaggcttttgcaaactacacaattggaattgtgttaattgtgatacattctgtgctggtagtacatttattagtgatgaagttgcgagagacttgtcactacagtttaaaagaccaataaatcctactgaccagtcttcttacatcgttgatagtgttacagtgaagaatggttccatccatctttactttgataaagctggtcaaaagacttatgaaagacattctctctctcattttgttaacttagacaacctgagagctaataacactaaaggttcattgcctattaatgttatagtttttgatggtaaatcaaaatgtgaagaatcatctgcaaaatcagcgtctgtttactacagtcagcttatgtgtcaacctatactgttactagatcaggcattagtgtctgatgttggtgatagtgcggaagttgcagttaaaatgtttgatgcttacgttaatacgttttcatcaacttttaacgtaccaatggaaaaactcaaaacactagttgcaactgcagaagctgaacttgcaaagaatgtgtccttagacaatgtcttatctacttttatttcagcagctcggcaagggtttgttgattcagatgtagaaactaaagatgttgttgaatgtcttaaattgtcacatcaatctgacatagaagttactggcgatagttgtaataactatatgctcacctataacaaagttgaaaacatgacaccccgtgaccttggtgcttgtattgactgtagtgcgcgtcatattaatgcgcaggtagcaaaaagtcacaacattgctttgatatggaacgttaaagatttcatgtcattgtctgaacaactacgaaaacaaatacgtagtgctgctaaaaagaataacttaccttttaagttgacatgtgcaactactagacaagttgttaatgttgtaacaacaaagatagcacttaagggtggtaaaattgttaataattggttgaagcagttaattaaagttacacttgtgttcctttttgttgctgctattttctatttaataacacctgttcatgtcatgtctaaacatactgacttttcaagtgaaatcataggatacaaggctattgatggtggtgtcactcgtgacatagcatctacagatacttgttttgctaacaaacatgctgattttgacacatggtttagccagcgtggtggtagttatactaatgacaaagcttgcccattgattgctgcagtcataacaagagaagtgggttttgtcgtgcctggtttgcctggcacgatattacgcacaactaatggtgactttttgcatttcttacctagagtttttagtgcagttggtaacatctgttacacaccatcaaaacttatagagtacactgactttgcaacatcagcttgtgttttggctgctgaatgtacaatttttaaagatgcttctggtaagccagtaccatattgttatgataccaatgtactagaaggttctgttgcttatgaaagtttacgccctgacacacgttatgtgctcatggatggctctattattcaatttcctaacacctaccttgaaggttctgttagagtggtaacaacttttgattctgagtactgtaggcacggcacttgtgaaagatcagaagctggtgtttgtgtatctactagtggtagatgggtacttaacaatgattattacagatctttaccaggagttttctgtggtgtagatgctgtaaatttacttactaatatgtttacaccactaattcaacctattggtgctttggacatatcagcatctatagtagctggtggtattgtagctatcgtagtaacatgccttgcctactattttatgaggtttagaagagcttttggtgaatacagtcatgtagttgcctttaatactttactattccttatgtcattcactgtactctgtttaacaccagtttactcattcttacctggtgtttattctgttatttacttgtacttgacattttatcttactaatgatgtttcttttttagcacatattcagtggatggttatgttcacacctttagtacctttctggataacaattgcttatatcatttgtatttccacaaagcatttctattggttctttagtaattacctaaagagacgtgtagtctttaatggtgtttcctttagtacttttgaagaagctgcgctgtgcacctttttgttaaataaagaaatgtatctaaagttgcgtagtgatgtgctattacctcttacgcaatataatagatacttagctctttataataagtacaagtattttagtggagcaatggatacaactagctacagagaagctgcttgttgtcatctcgcaaaggctctcaatgacttcagtaactcaggttctgatgttctttaccaaccaccacaaacctctatcacctcagctgttttgcagagtggttttagaaaaatggcattcccatctggtaaagttgagggttgtatggtacaagtaacttgtggtacaactacacttaacggtctttggcttgatgacgtagtttactgtccaagacatgtgatctgcacctctgaagacatgcttaaccctaattatgaagatttactcattcgtaagtctaatcataatttcttggtacaggctggtaatgttcaactcagggttattggacattctatgcaaaattgtgtacttaagcttaaggttgatacagccaatcctaagacacctaagtataagtttgttcgcattcaaccaggacagactttttcagtgttagcttgttacaatggttcaccatctggtgtttaccaatgtgctatgaggcccaatttcactattaagggttcattccttaatggttcatgtggtagtgttggttttaacatagattatgactgtgtctctttttgttacatgcaccatatggaattaccaactggagttcatgctggcacagacttagaaggtaacttttatggaccttttgttgacaggcaaacagcacaagcagctggtacggacacaactattacagttaatgttttagcttggttgtacgctgctgttataaatggagacaggtggtttctcaatcgatttaccacaactcttaatgactttaaccttgtggctatgaagtacaattatgaacctctaacacaagaccatgttgacatactaggacctctttctgctcaaactggaattgccgttttagatatgtgtgcttcattaaaagaattactgcaaaatggtatgaatggacgtaccatattgggtagtgctttattagaagatgaatttacaccttttgatgttgttagacaatgctcaggtgttactttccaaagtgcagtgaaaagaacaatcaagggtacacaccactggttgttactcacaattttgacttcacttttagttttagtccagagtactcaatggtctttgttcttttttttgtatgaaaatgcctttttaccttttgctatgggtattattgctatgtctgcttttgcaatgatgtttgtcaaacataagcatgcatttctctgtttgtttttgttaccttctcttgccactgtagcttattttaatatggtctatatgcctgctagttgggtgatgcgtattatgacatggttggatatggttgatactagtttgtctggttttaagctaaaagactgtgttatgtatgcatcagctgtagtgttactaatccttatgacagcaagaactgtgtatgatgatggtgctaggagagtgtggacacttatgaatgtcttgacactcgtttataaagtttattatggtaatgctttagatcaagccatttccatgtgggctcttataatctctgttacttctaactactcaggtgtagttacaactgtcatgtttttggccagaggtattgtttttatgtgtgttgagtattgccctattttcttcataactggtaatacacttcagtgtataatgctagtttattgtttcttaggctatttttgtacttgttactttggcctcttttgtttactcaaccgctactttagactgactcttggtgtttatgattacttagtttctacacaggagtttagatatatgaattcacagggactactcccacccaagaatagcatagatgccttcaaactcaacattaaattgttgggtgttggtggcaaaccttgtatcaaagtagccactgtacagtctaaaatgtcagatgtaaagtgcacatcagtagtcttactctcagttttgcaacaactcagagtagaatcatcatctaaattgtgggctcaatgtgtccagttacacaatgacattctcttagctaaagatactactgaagcctttgaaaaaatggtttcactactttctgttttgctttccatgcagggtgctgtagacataaacaagctttgtgaagaaatgctggacaacagggcaaccttacaagctatagcctcagagtttagttcccttccatcatatgcagcttttgctactgctcaagaagcttatgagcaggctgttgctaatggtgattctgaagttgttcttaaaaagttgaagaagtctttgaatgtggctaaatctgaatttgaccgtgatgcagccatgcaacgtaagttggaaaagatggctgatcaagctatgacccaaatgtataaacaggctagatctgaggacaagagggcaaaagttactagtgctatgcagacaatgcttttcactatgcttagaaagttggataatgatgcactcaacaacattatcaacaatgcaagagatggttgtgttcccttgaacataatacctcttacaacagcagccaaactaatggttgtcataccagactataacacatataaaaatacgtgtgatggtacaacatttacttatgcatcagcattgtgggaaatccaacaggttgtagatgcagatagtaaaattgttcaacttagtgaaattagtatggacaattcacctaatttagcatggcctcttattgtaacagctttaagggccaattctgctgtcaaattacagaataatgagcttagtcctgttgcactacgacagatgtcttgtgctgccggtactacacaaactgcttgcactgatgacaatgcgttagcttactacaacacaacaaagggaggtaggtttgtacttgcactgttatccgatttacaggatttgaaatgggctagattccctaagagtgatggaactggtactatctatacagaactggaaccaccttgtaggtttgttacagacacacctaaaggtcctaaagtgaagtatttatactttattaaaggattaaacaacctaaatagaggtatggtacttggtagtttagctgccacagtacgtctacaagctggtaatgcaacagaagtgcctgccaattcaactgtattatctttctgtgcttttgctgtagatgctgctaaagcttacaaagattatctagctagtgggggacaaccaatcactaattgtgttaagatgttgtgtacacacactggtactggtcaggcaataacagttacaccggaagccaatatggatcaagaatcctttggtggtgcatcgtgttgtctgtactgccgttgccacatagatcatccaaatcctaaaggattttgtgacttaaaaggtaagtatgtacaaatacctacaacttgtgctaatgaccctgtgggttttacacttaaaaacacagtctgtaccgtctgcggtatgtggaaaggttatggctgtagttgtgatcaactccgcgaacccatgcttcagtcagctgatgcacaatcgtttttaaacgggtttgcggtgtaagtgcagcccgtcttacaccgtgcggcacaggcactagtactgatgtcgtatacagggcttttgacatctacaatgataaagtagctggttttgctaaattcctaaaaactaattgttgtcgcttccaagaaaaggacgaagatgacaatttaattgattcttactttgtagttaagagacacactttctctaactaccaacatgaagaaacaatttataatttacttaaggattgtccagctgttgctaaacatgacttctttaagtttagaatagacggtgacatggtaccacatatatcacgtcaacgtcttactaaatacacaatggcagacctcgtctatgctttaaggcattttgatgaaggtaattgtgacacattaaaagaaatacttgtcacatacaattgttgtgatgatgattatttcaataaaaaggactggtatgattttgtagaaaacccagatatattacgcgtatacgccaacttaggtgaacgtgtacgccaagctttgttaaaaacagtacaattctgtgatgccatgcgaaatgctggtattgttggtgtactgacattagataatcaagatctcaatggtaactggtatgatttcggtgatttcatacaaaccacgccaggtagtggagttcctgttgtagattcttattattcattgttaatgcctatattaaccttgaccagggctttaactgcagagtcacatgttgacactgacttaacaaagccttacattaagtgggatttgttaaaatatgacttcacggaagagaggttaaaactctttgaccgttattttaaatattgggatcagacataccacccaaattgtgttaactgtttggatgacagatgcattctgcattgtgcaaactttaatgttttattctctacagtgttcccacctacaagttttggaccactagtgagaaaaatatttgttgatggtgttccatttgtagtttcaactggataccacttcagagagctaggtgttgtacataatcaggatgtaaacttacatagctctagacttagttttaaggaattacttgtgtatgctgctgaccctgctatgcacgctgcttctggtaatctattactagataaacgcactacgtgcttttcagtagctgcacttactaacaatgttgcttttcaaactgtcaaacccggtaattttaacaaagacttctatgactttgctgtgtctaagggtttctttaaggaaggaagttctgttgaattaaaacacttcttctttgctcaggatggtaatgctgctatcagcgattatgactactatcgttataatctaccaacaatgtgtgatatcagacaactactatttgtagttgaagttgttgataagtactttgattgttacgatggtggctgtattaatgctaaccaagtcatcgtcaacaacctagacaaatcagctggttttccatttaataaatggggtaaggctagactttattatgattcaatgagttatgaggatcaagatgcacttttcgcatatacaaaacgtaatgtcatccctactataactcaaatgaatcttaagtatgccattagtgcaaagaatagagctcgcaccgtagctggtgtctctatctgtagtactatgaccaatagacagtttcatcaaaaattattgaaatcaatagccgccactagaggagctactgtagtaattggaacaagcaaattctatggtggttggcacaacatgttaaaaactgtttatagtgatgtagaaaaccctcaccttatgggttgggattatcctaaatgtgatagagccatgcctaacatgcttagaattatggcctcacttgttcttgctcgcaaacatacaacgtgttgtagcttgtcacaccgtttctatagattagctaatgagtgtgctcaagtattgagtgaaatggtcatgtgtggcggttcactatatgttaaaccaggtggaacctcatcaggagatgccacaactgcttatgctaatagtgtttttaacatttgtcaagctgtcacggccaatgttaatgcacttttatctactgatggtaacaaaattgccgataagtatgtccgcaatttacaacacagactttatgagtgtctctatagaaatagagatgttgacacagactttgtgaatgagttttacgcatatttgcgtaaacatttctcaatgatgatactctctgacgatgctgttgtgtgtttcaatagcacttatgcatctcaaggtctagtggctagcataaagaactttaagtcagttctttattatcaaaacaatgtttttatgtctgaagcaaaatgttggactgagactgaccttactaaaggacctcatgaattttgctctcaacatacaatgctagttaaacagggtgatgattatgtgtaccttccttacccagatccatcaagaatcctaggggccggctgttttgtagatgatatcgtaaaaacagatggtacacttatgattgaacggttcgtgtctttagctatagatgcttacccacttactaaacatcctaatcaggagtatgctgatgtctttcatttgtacttacaatacataagaaagctacatgatgagttaacaggacacatgttagacatgtattctgttatgcttactaatgataacacttcaaggtattgggaacctgagttttatgaggctatgtacacaccgcatacagtcttacaggctgttggggcttgtgttctttgcaattcacagacttcattaagatgtggtgcttgcatacgtagaccattcttatgttgtaaatgctgttacgaccatgtcatatcaacatcacataaattagtcttgtctgttaatccgtatgtttgcaatgctccaggttgtgatgtcacagatgtgactcaactttacttaggaggtatgagctattattgtaaatcacataaaccacccattagttttccattgtgtgctaatggacaagtttttggtttatataaaaatacatgtgttggtagcgataatgttactgactttaatgcaattgcaacatgtgactggacaaatgctggtgattacattttagctaacacctgtactgaaagactcaagctttttgcagcagaaacgctcaaagctactgaggagacatttaaactgtcttatggtattgctactgtacgtgaagtgctgtctgacagagaattacatctttcatgggaagttggtaaacctagaccaccacttaaccgaaattatgtctttactggttatcgtgtaactaaaaacagtaaagtacaaataggagagtacacctttgaaaaaggtgactatggtgatgctgttgtttaccgaggtacaacaacttacaaattaaatgttggtgattattttgtgctgacatcacatacagtaatgccattaagtgcacctacactagtgccacaagagcactatgttagaattactggcttatacccaacactcaatatctcagatgagttttctagcaatgttgcaaattatcaaaaggttggtatgcaaaagtattctacactccagggaccacctggtactggtaagagtcattttgctattggcctagctctctactacccttctgctcgcatagtgtatacagcttgctctcatgccgctgttgatgcactatgtgagaaggcattaaaatatttgcctatagataaatgtagtagaattatacctgcacgtgctcgtgtagagtgttttgataaattcaaagtgaattcaacattagaacagtatgtcttttgtactgtaaatgcattgcctgagacgacagcagatatagttgtctttgatgaaatttcaatggccacaaattatgatttgagtgttgtcaatgccagattacgtgctaagcactatgtgtacattggcgaccctgctcaattacctgcaccacgcacattgctaactaagggcacactagaaccagaatatttcaattcagtgtgtagacttatgaaaactataggtccagacatgttcctcggaacttgtcggcgttgtcctgctgaaattgttgacactgtgagtgctttggtttatgataataagcttaaagcacataaagacaaatcagctcaatgctttaaaatgttttataagggtgttatcacgcatgatgtttcatctgcaattaacaggccacaaataggcgtggtaagagaattccttacacgtaaccctgcttggagaaaagctgtctttatttcaccttataattcacagaatgctgtagcctcaaagattttgggactaccaactcaaactgttgattcatcacagggctcagaatatgactatgtcatattcactcaaaccactgaaacagctcactcttgtaatgtaaacagatttaatgttgctattaccagagcaaaagtaggcatactttgcataatgtctgatagagacctttatgacaagttgcaatttacaagtcttgaaattccacgtaggaatgtggcaactttacaagctgaaaatgtaacaggactctttaaagattgtagtaaggtaatcactgggttacatcctacacaggcacctacacacctcagtgttgacactaaattcaaaactgaaggtttatgtgttgacatacctggcatacctaaggacatgacctatagaagactcatctctatgatgggttttaaaatgaattatcaagttaatggttaccctaacatgtttatcacccgcgaagaagctataagacatgtacgtgcatggattggcttcgatgtcgaggggtgtcatgctactagagaagctgttggtaccaatttacctttacagctaggtttttctacaggtgttaacctagttgctgtacctacaggttatgttgatacacctaataatacagatttttccagagttagtgctaaaccaccgcctggagatcaatttaaacacctcataccacttatgtacaaaggacttccttggaatgtagtgcgtataaagattgtacaaatgttaagtgacacacttaaaaatctctctgacagagtcgtatttgtcttatgggcacatggctttgagttgacatctatgaagtattttgtgaaaataggacctgagcgcacctgttgtctatgtgatagacgtgccacatgcttttccactgcttcagacacttatgcctgttggcatcattctattggatttgattacgtctataatccgtttatgattgatgttcaacaatggggttttacaggtaacctacaaagcaaccatgatctgtattgtcaagtccatggtaatgcacatgtagctagttgtgatgcaatcatgactaggtgtctagctgtccacgagtgctttgttaagcgtgttgactggactattgaatatcctataattggtgatgaactgaagattaatgcggcttgtagaaaggttcaacacatggttgttaaagctgcattattagcagacaaattcccagttcttcacgacattggtaaccctaaagctattaagtgtgtacctcaagctgatgtagaatggaagttctatgatgcacagccttgtagtgacaaagcttataaaatagaagaattattctattcttatgccacacattctgacaaattcacagatggtgtatgcctattttggaattgcaatgtcgatagatatcctgctaattccattgtttgtagatttgacactagagtgctatctaaccttaacttgcctggttgtgatggtggcagtttgtatgtaaataaacatgcattccacacaccagcttttgataaaagtgcttttgttaatttaaaacaattaccatttttctattactctgacagtccatgtgagtctcatggaaaacaagtagtgtcagatatagattatgtaccactaaagtctgctacgtgtataacacgttgcaatttaggtggtgctgtctgtagacatcatgctaatgagtacagattgtatctcgatgcttataacatgatgatctcagctggctttagcttgtgggtttacaaacaatttgatacttataacctctggaacacttttacaagacttcagagtttagaaaatgtggcttttaatgttgtaaataagggacactttgatggacaacagggtgaagtaccagtttctatcattaataacactgtttacacaaaagttgatggtgttgatgtagaattgtttgaaaataaaacaacattacctgttaatgtagcatttgagctttgggctaagcgcaacattaaaccagtaccagaggtgaaaatactcaataatttgggtgtggacattgctgctaatactgtgatctgggactacaaaagagatgctccagcacatatatctactattggtgtttgttctatgactgacatagccaagaaaccaactgaaacgatttgtgcaccactcactgtcttttttgatggtagagttgatggtcaagtagacttatttagaaatgcccgtaatggtgttcttattacagaaggtagtgttaaaggtttacaaccatctgtaggtcccaaacaagctagtcttaatggagtcacattaattggagaagccgtaaaaacacagttcaattattataagaaagttgatggtgttgtccaacaattacctgaaacttactttactcagagtagaaatttacaagaatttaaacccaggagtcaaatggaaattgatttcttagaattagctatggatgaattcattgaacggtataaattagaaggctatgccttcgaacatatcgtttatggagattttagtcatagtcagttaggtggtttacatctactgattggactagctaaacgttttaaggaatcaccttttgaattagaagattttattcctatggacagtacagttaaaaactatttcataacagatgcgcaaacaggttcatctaagtgtgtgtgttctgttattgatttattacttgatgattttgttgaaataataaaatcccaagatttatctgtagtttctaaggttgtcaaagtgactattgactatacagaaatttcatttatgctttggtgtaaagatggccatgtagaaacattttacccaaaattacaatctagtcaagcgtggcaaccgggtgttgctatgcctaatctttacaaaatgcaaagaatgctattagaaaagtgtgaccttcaaaattatggtgatagtgcaacattacctaaaggcataatgatgaatgtcgcaaaatatactcaactgtgtcaatatttaaacacattaacattagctgtaccctataatatgagagttatacattttggtgctggttctgataaaggagttgcaccaggtacagctgttttaagacagtggttgcctacgggtacgctgcttgtcgattcagatcttaatgactttgtctctgatgcagattcaactttgattggtgattgtgcaactgtacatacagctaataaatgggatctcattattagtgatatgtacgaccctaagactaaaaatgttacaaaagaaaatgactctaaagagggttttttcacttacatttgtgggtttatacaacaaaagctagctcttggaggttccgtggctataaagataacagaacattcttggaatgctgatctttataagctcatgggacacttcgcatggtggacagcctttgttactaatgtgaatgcgtcatcatctgaagcatttttaattggatgtaattatcttggcaaaccacgcgaacaaatagatggttatgtcatgcatgcaaattacatattttggaggaatacaaatccaattcagttgtcttcctattctttatttgacatgagtaaatttccccttaaattaaggggtactgctgttatgtctttaaaagaaggtcaaatcaatgatatgattttatctcttcttagtaaaggtagacttataattagagaaaacaacagagttgttatttctagtgatgttcttgttaacaactaaacgaacaatggaagatgccaaaaacattaagaagggcccagcgccattctacccactcgaagacgggaccgccggcgagcagctgcacaaagccatgaagcgctacgccctggtgcccggcaccatcgcctttaccgacgcacatatcgaggtggacattacctacgccgagtacttcgagatgagcgttcggctggcagaagctatgaagcgctatgggctgaatacaaaccatcggatcgtggtgtgcagcgagaatagcttgcagttcttcatgcccgtgttgggtgccctgttcatcggtgtggctgtggccccagctaacgacatctacaacgagcgcgagctgctgaacagcatgggcatcagccagcccaccgtcgtattcgtgagcaagaaagggctgcaaaagatcctcaacgtgcaaaagaagctaccgatcatacaaaagatcatcatcatggatagcaagaccgactaccagggcttccaaagcatgtacaccttcgtgacttcccatttgccacccggcttcaacgagtacgacttcgtgcccgagagcttcgaccgggacaaaaccatcgccctgatcatgaacagtagtggcagtaccggattgcccaagggcgtagccctaccgcaccgcaccgcttgtgtccgattcagtcatgcccgcgaccccatcttcggcaaccagatcatccccgacaccgctatcctcagcgtggtgccatttcaccacggcttcggcatgttcaccacgctgggctacttgatctgcggctttcgggtcgtgctcatgtaccgcttcgaggaggagctattcttgcgcagcttgcaagactataagattcaatctgccctgctggtgcccacactatttagcttcttcgctaagagcactctcatcgacaagtacgacctaagcaacttgcacgagatcgccagcggcggggcgccgctcagcaaggaggtaggtgaggccgtggccaaacgcttccacctaccaggcatccgccagggctacggcctgacagaaacaaccagcgccattctgatcacccccgaaggggacgacaagcctggcgcagtaggcaaggtggtgcccttcttcgaggctaaggtggtggacttggacaccggtaagacactgggtgtgaaccagcgcggcgagctgtgcgtccgtggccccatgatcatgagcggctacgttaacaaccccgaggctacaaacgctctcatcgacaaggacggctggctgcacagcggcgacatcgcctactgggacgaggacgagcacttcttcatcgtggaccggctgaagagcctgatcaaatacaagggctaccaggtagccccagccgaactggagagcatcctgctgcaacaccccaacatcttcgacgccggggtcgccggcctgcccgacgacgatgccggcgagctgcccgccgcagtcgtcgtgctggaacacggtaaaaccatgaccgagaaggagatcgtggactatgtggccagccaggttacaaccgccaagaagctgcgcggtggtgttgtgttcgtggacgaggtgcctaaaggactgaccggcaagttggacgcccgcaagatccgcgagattctcattaaggccaagaagggcggcaagatcgccgtgcagtcgacggtaccgcgggcccgggatccaccggtcgccaccatggtgagcaagggcgaggagctgttcaccggggtggtgcccatcctggtcgagctggacggcgacgtaaacggccacaagttcagcgtgtccggcgagggcgagggcgatgccacctacggcaagctgaccctgaagttcatctgcaccaccggcaagctgcccgtgccctggcccaccctcgtgaccaccctgacctacggcgtgcagtgcttcagccgctaccccgaccacatgaagcagcacgacttcttcaagtccgccatgcccgaaggctacgtccaggagcgcaccatcttcttcaaggacgacggcaactacaagacccgcgccgaggtgaagttcgagggcgacaccctggtgaaccgcatcgagctgaagggcatcgacttcaaggaggacggcaacatcctggggcacaagctggagtacaactacaacagccacaacgtctatatcatggccgacaagcagaagaacggcatcaaggtgaacttcaagatccgccacaacatcgaggacggcagcgtgcagctcgccgaccactaccagcagaacacccccatcggcgacggccccgtgctgctgcccgacaaccactacctgagcacccagtccgccctgagcaaagaccccaacgagaagcgcgatcacatggtcctgctggagttcgtgaccgccgccgggatcactctcggcatggacgagctgtacaagtaaacgaacttatggatttgtttatgagaatcttcacaattggaactgtaactttgaagcaaggtgaaatcaaggatgctactccttcagattttgttcgcgctactgcaacgataccgatacaagcctcactccctttcggatggcttattgttggcgttgcacttcttgctgtttttcagagcgcttccaaaatcataaccctcaaaaagagatggcaactagcactctccaagggtgttcactttgtttgcaacttgctgttgttgtttgtaacagtttactcacaccttttgctcgttgctgctggccttgaagccccttttctctatctttatgctttagtctacttcttgcagagtataaactttgtaagaataataatgaggctttggctttgctggaaatgccgttccaaaaacccattactttatgatgccaactattttctttgctggcatactaattgttacgactattgtataccttacaatagtgtaacttcttcaattgtcattacttcaggtgatggcacaacaagtcctatttctgaacatgactaccagattggtggttatactgaaaaatgggaatctggagtaaaagactgtgttgtattacacagttacttcacttcagactattaccagctgtactcaactcaattgagtacagacactggtgttgaacatgttaccttcttcatctacaataaaattgttgatgagcctgaagaacatgtccaaattcacacaatcgacggttcatccggagttgttaatccagtaatggaaccaatttatgatgaaccgacgacgactactagcgtgcctttgtaagcacaagctgatgagtacgaacttatgatcgagcaggatggcctgcatgccggatctccagctgcctgggttgagagactgttcggctatgattgggcccagcagaccatcggctgttctgatgccgccgtgtttagactgagtgcccagggtagacccgtgctgttcgtgaaaaccgatctgtctggcgccctgaacgagctgcaggatgaagccgctagactgagctggctggctacaacaggcgtgccatgtgctgccgtgctggatgtggttacagaggccggaagagactggctgctgctgggagaagttccaggccaggatctgctgagcagtcatctggcccctgccgagaaggtgtccattatggccgatgccatgcggcggctgcacacacttgatcctgccacctgtcctttcgaccaccaagccaagcaccggatcgagagggccagaaccagaatggaagccggcctggtggaccaggacgacctggatgaagaacaccaaggactggccccagctgagctgttcgccagactgaaagccagaatgcccgacggcgaggatctggtggttacacatggggatgcctgcctgcctaacatcatggtggaaaacggccggttcagcggctttatcgactgtggcagactgggcgtcgccgacagatatcaggatatcgccctggccaccagagatatcgccgaagaacttggcggagagtgggccgatagattcctggtgctgtacggaatcgccgctcctgactctcagcggatcgccttctacagactgctggacgagttcttctgagtgacaacagatgtttcatctcgttgactttcaggttactatagcagagatattactaattattatgaggacttttaaagtttccatttggaatcttgattacatcataaacctcataattaaaaatttatctaagtcactaactgagaataaatattctcaattagatgaagagcaaccaatggagattgattaaacgaacatgaaaattattcttttcttggcactgataacactcgctacttgtgagctttatcactaccaagagtgtgttagaggtacaacagtacttttaaaagaaccttgctcttctggaacatacgagggcaattcaccatttcatcctctagctgataacaaatttgcactgacttgctttagcactcaatttgcttttgcttgtcctgacggcgtaaaacacgtctatcagttacgtgccagatcagtttcacctaaactgttcatcagacaagaggaagttcaagaactttactctccaatttttcttattgttgcggcaatagtgtttataacactttgcttcacactcaaaagaaagacagaatgattgaactttcattaattgacttctatttgtgctttttagcctttctgctattccttgttttaattatgcttattatcttttggttctcacttgaactgcaagatcataatgaaacttgtcacgcctaaacgaacatgaaatttcttgttttcttaggaatcatcacaactgtagctgcatttcaccaagaatgtagtttacagtcatgtactcaacatcaaccatatgtagttgatgacccgtgtcctattcacttctattctaaatggtatattagagtaggagctagaaaatcagcacctttaattgaattgtgcgtggatgaggctggttctaaatcacccattcagtacatcgatatcggtaattatacagtttcctgtttaccttttacaattaattgccaggaacctaaattgggtagtcttgtagtgcgttgttcgttctatgaagactttttagagtatcatgacgttcgtgttgttttagatttcatctaaacgaacaaactaaaatgtctgataatggaccccaaaatcagcgaaatgcaccccgcattacgtttggtggaccctcagattcaactggcagtaaccagaatggagaacgcagtggggcgcgatcaaaacaacgtcggccccaaggtttacccaataatactgcgtcttggttcaccgctctcactcaacatggcaaggaagaccttaaattccctcgaggacaaggcgttccaattaacaccaatagcagtccagatgaccaaattggctactaccgaagagctaccagacgaattcgtggtggtgacggtaaaatgaaagatctcagtccaagatggtatttctactacctaggaactgggccagaagctggacttccctatggtgctaacaaagacggcatcatatgggttgcaactgagggagccttgaatacaccaaaagatcacattggcacccgcaatcctgctaacaatgctgcaatcgtgctacaacttcctcaaggaacaacattgccaaaaggcttctacgcagaagggagcagaggcggcagtcaagcctcttctcgttcctcatcacgtagtcgcaacagttcaagaaattcaactccaggcagcagtaggggaacttctcctgctagaatggctggcaatggcggtgatgctgctcttgctttgctgctgcttgacagattgaaccagcttgagagcaaaatgtctggtaaaggccaacaacaacaaggccaaactgtcactaagaaatctgctgctgaggcttctaagaagcctcggcaaaaacgtactgccactaaagcatacaatgtaacacaagctttcggcagacgtggtccagaacaaacccaaggaaattttggggaccaggaactaatcagacaaggaactgattacaaacattggccgcaaattgcacaatttgcccccagcgcttcagcgttcttcggaatgtcgcgcattggcatggaagtcacaccttcgggaacgtggttgacctacacaggtgccatcaaattggatgacaaagatccaaatttcaaagatcaagtcattttgctgaataagcatattgacgcatacaaaacattcccaccaacagagcctaaaaaggacaaaaagaagaaggctgatgaaactcaagccttaccgcagagacagaagaaacagcaaactgtgactcttcttcctgctgcagatttggatgatttctccaaacaattgcaacaatccatgagcagtgctgactcaactcaggcctaaactcatgcagaccacacaaggcagatgggctatataaacgttttcgcttttccgtttacgatatatagtctactcttgtgcagaatgaattctcgtaactacatagcacaagtagatgtagttaactttaatctcacatagcaatctttaatcagtgtgtaacattagggaggacttgaaagagccaccacattttcaccgaggccacgcggagtacgatcgagtgtacagtgaacaatgctagggagagctgcctatatggaagagccctaatgtgtaaaattaattttagtagtgctatccccatgtgattttaatagcttcttaggagaatgacaaaaaaaaaaaaaaaaaaaaaaaaaagggtcggcatggcatctccacctcctcgcggtccgacctgggcatccgaaggaggacgcacgtccactcggatggctaagggagagcctgcagtagcataaccccttggggcctctaaacgggtcttgaggggttttttg

SEQ ID NO: 3 - DNA, 36846 bp, Artificial Sequence
  CMV-T7-scv2-luc-GFP replicon
gcggccgctaatacgactcactatagattaaaggtttataccttcccaggtaacaaaccaaccaactttcgatctcttgtagatctgttctctaaacgaactttaaaatctgtgtggctgtcactcggctgcatgcttagtgcactcacgcagtataattaataactaattactgtcgttgacaggacacgagtaactcgtctatcttctgcaggctgcttacggtttcgtccgtgttgcagccgatcatcagcacatctaggtttcgtccgggtgtgaccgaaaggtaagatggagagccttgtccctggtttcaacgagaaaacacacgtccaactcagtttgcctgttttacaggttcgcgacgtgctcgtacgtggctttggagactccgtggaggaggtcttatcagaggcacgtcaacatcttaaagatggcacttgtggcttagtagaagttgaaaaaggcgttttgcctcaacttgaacagccctatgtgttcatcaaacgttcggatgctcgaactgcacctcatggtcatgttatggttgagctggtagcagaactcgaaggcattcagtacggtcgtagtggtgagacacttggtgtccttgtccctcatgtgggcgaaataccagtggcttaccgcaaggttcttcttcgtaagaacggtaataaaggagctggtggccatagttacggcgccgatctaaagtcatttgacttaggcgacgagcttggcactgatccttatgaagattttcaagaaaactggaacactaaacatagcagtggtgttacccgtgaactcatgcgtgagcttaacggaggggcatacactcgctatgtcgataacaacttctgtggccctgatggctaccctcttgagtgcattaaagaccttctagcacgtgctggtaaagcttcatgcactttgtccgaacaactggactttattgacactaagaggggtgtatactgctgccgtgaacatgagcatgaaattgcttggtacacggaacgttctgaaaagagctatgaattgcagacaccttttgaaattaaattggcaaagaaatttgacaccttcaatggggaatgtccaaattttgtatttcccttaaattccataatcaagactattcaaccaagggttgaaaagaaaaagcttgatggctttatgggtagaattcgatctgtctatccagttgcgtcaccaaatgaatgcaaccaaatgtgcctttcaactctcatgaagtgtgatcattgtggtgaaacttcatggcagacgggcgattttgttaaagccacttgcgaattttgtggcactgagaatttgactaaagaaggtgccactacttgtggttacttaccccaaaatgctgttgttaaaatttattgtccagcatgtcacaattcagaagtaggacctgagcatagtcttgccgaataccataatgaatctggcttgaaaaccattcttcgtaagggtggtcgcactattgcctttggaggctgtgtgttctcttatgttggttgccataacaagtgtgcctattgggttccacgtgctagcgctaacataggttgtaaccatacaggtgttgttggagaaggttccgaaggtcttaatgacaaccttcttgaaatactccaaaaagagaaagtcaacatcaatattgttggtgactttaaacttaatgaagagatcgccattattttggcatctttttctgcttccacaagtgcttttgtggaaactgtgaaaggtttggattataaagcattcaaacaaattgttgaatcctgtggtaattttaaagttacaaaaggaaaagctaaaaaaggtgcctggaatattggtgaacagaaatcaatactgagtcctctttatgcatttgcatcagaggctgctcgtgttgtacgatcaattttctcccgcactcttgaaactgctcaaaattctgtgcgtgttttacagaaggccgctataacaatactagatggaatttcacagtattcactgagactcattgatgctatgatgttcacatctgatttggctactaacaatctagttgtaatggcctacattacaggtggtgttgttcagttgacttcgcagtggctaactaacatctttggcactgtttatgaaaaactcaaacccgtccttgattggcttgaagagaagtttaaggaaggtgtagagtttcttagagacggttgggaaattgttaaatttatctcaacctgtgcttgtgaaattgtcggtggacaaattgtcacctgtgcaaaggaaattaaggagagtgttcagacattctttaagcttgtaaataaatttttggctttgtgtgctgactctatcattattggtggagctaaacttaaagccttgaatttaggtgaaacatttgtcacgcactcaaagggattgtacagaaagtgtgttaaatccagagaagaaactggcctactcatgcctctaaaagccccaaaagaaattatcttcttagagggagaaacacttcccacagaagtgttaacagaggaagttgtcttgaaaactggtgatttacaaccattagaacaacctactagtgaagctgttgaagctccattggttggtacaccagtttgtattaacgggcttatgttgctcgaaatcaaagacacagaaaagtactgtgcccttgcacctaatatgatggtaacaaacaataccttcacactcaaaggcggtgcaccaacaaaggttacttttggtgatgacactgtgatagaagtgcaaggttacaagagtgtgaatatcacttttgaacttgatgaaaggattgataaagtacttaatgagaagtgctctgcctatacagttgaactcggtacagaagtaaatgagttcgcctgtgttgtggcagatgctgtcataaaaactttgcaaccagtatctgaattacttacaccactgggcattgatttagatgagtggagtatggctacatactacttatttgatgagtctggtgagtttaaattggcttcacatatgtattgttctttctaccctccagatgaggatgaagaagaaggtgattgtgaagaagaagagtttgagccatcaactcaatatgagtatggtactgaagatgattaccaaggtaaacctttggaatttggtgccacttctgctgctcttcaacctgaagaagagcaagaagaagattggttagatgatgatagtcaacaaactgttggtcaacaagacggcagtgaggacaatcagacaactactattcaaacaattgttgaggttcaacctcaattagagatggaacttacaccagttgttcagactattgaagtgaatagttttagtggttatttaaaacttactgacaatgtatacattaaaaatgcagacattgtggaagaagctaaaaaggtaaaaccaacagtggttgttaatgcagccaatgtttaccttaaacatggaggaggtgttgcaggagccttaaataaggctactaacaatgccatgcaagttgaatctgatgattacatagctactaatggaccacttaaagtgggtggtagttgtgttttaagcggacacaatcttgctaaacactgtcttcatgttgtcggcccaaatgttaacaaaggtgaagacattcaacttcttaagagtgcttatgaaaattttaatcagcacgaagttctacttgcaccattattatcagctggtatttttggtgctgaccctatacattctttaagagtttgtgtagatactgttcgcacaaatgtctacttagctgtctttgataaaaatctctatgacaaacttgtttcaagctttttggaaatgaagagtgaaaagcaagttgaacaaaagatcgctgagattcctaaagaggaagttaagccatttataactgaaagtaaaccttcagttgaacagagaaaacaagatgataagaaaatcaaagcttgtgttgaagaagttacaacaactctggaagaaactaagttcctcacagaaaacttgttactttatattgacattaatggcaatcttcatccagattctgccactcttgttagtgacattgacatcactttcttaaagaaagatgctccatatatagtgggtgatgttgttcaagagggtgttttaactgctgtggttatacctactaaaaaggctggtggcactactgaaatgctagcgaaagctttgagaaaagtgccaacagacaattatataaccacttacccgggtcagggtttaaatggttacactgtagaggaggcaaagacagtgcttaaaaagtgtaaaagtgccttttacattctaccatctattatctctaatgagaagcaagaaattcttggaactgtttcttggaatttgcgagaaatgcttgcacatgcagaagaaacacgcaaattaatgcctgtctgtgtggaaactaaagccatagtttcaactatacagcgtaaatataagggtattaaaatacaagagggtgtggttgattatggtgctagattttacttttacaccagtaaaacaactgtagcgtcacttatcaacacacttaacgatctaaatgaaactcttgttacaatgccacttggctatgtaacacatggcttaaatttggaagaagctgctcggtatatgagatctctcaaagtgccagctacagtttctgtttcttcacctgatgctgttacagcgtataatggttatcttacttcttcttctaaaacacctgaagaacattttattgaaaccatctcacttgctggttcctataaagattggtcctattctggacaatctacacaactaggtatagaatttcttaagagaggtgataaaagtgtatattacactagtaatcctaccacattccacctagatggtgaagttatcacctttgacaatcttaagacacttctttctttgagagaagtgaggactattaaggtgtttacaacagtagacaacattaacctccacacgcaagttgtggacatgtcaatgacatatggacaacagtttggtccaacttatttggatggagctgatgttactaaaataaaacctcataattcacatgaaggtaaaacattttatgttttacctaatgatgacactctacgtgttgaggcttttgagtactaccacacaactgatcctagttttctgggtaggtacatgtcagcattaaatcacactaaaaagtggaaatacccacaagttaatggtttaacttctattaaatgggcagataacaactgttatcttgccactgcattgttaacactccaacaaatagagttgaagtttaatccacctgctctacaagatgcttattacagagcaagggctggtgaagctgctaacttttgtgcacttatcttagcctactgtaataagacagtaggtgagttaggtgatgttagagaaacaatgagttacttgtttcaacatgccaatttagattcttgcaaaagagtcttgaacgtggtgtgtaaaacttgtggacaacagcagacaacccttaagggtgtagaagctgttatgtacatgggcacactttcttatgaacaatttaagaaaggtgttcagataccttgtacgtgtggtaaacaagctacaaaatatctagtacaacaggagtcaccttttgttatgatgtcagcaccacctgctcagtatgaacttaagcatggtacatttacttgtgctagtgagtacactggtaattaccagtgtggtcactataaacatataacttctaaagaaactttgtattgcatagacggtgctttacttacaaagtcctcagaatacaaaggtcctattacggatgttttctacaaagaaaacagttacacaacaaccataaaaccagttacttataaattggatggtgttgtttgtacagaaattgaccctaagttggacaattattataagaaagacaattcttatttcacagagcaaccaattgatcttgtaccaaaccaaccatatccaaacgcaagcttcgataattttaagtttgtatgtgataatatcaaatttgctgatgatttaaaccagttaactggttataagaaacctgcttcaagagagcttaaagttacatttttccctgacttaaatggtgatgtggtggctattgattataaacactacacaccctcttttaagaaaggagctaaattgttacataaacctattgtttggcatgttaacaatgcaactaataaagccacgtataaaccaaatacctggtgtatacgttgtctttggagcacaaaaccagttgaaacatcaaattcgtttgatgtactgaagtcagaggacgcgcagggaatggataatcttgcctgcgaagatctaaaaccagtctctgaagaagtagtggaaaatcctaccatacagaaagacgttcttgagtgtaatgtgaaaactaccgaagttgtaggagacattatacttaaaccagcaaataatagtttaaaaattacagaagaggttggccacacagatctaatggctgcttatgtagacaattctagtcttactattaagaaacctaatgaattatctagagtattaggtttgaaaacccttgctactcatggtttagctgctgttaatagtgtcccttgggatactatagctaattatgctaagccttttcttaacaaagttgttagtacaactactaacatagttacacggtgtttaaaccgtgtttgtactaattatatgccttatttctttactttattgctacaattgtgtacttttactagaagtacaaattctagaattaaagcatctatgccgactactatagcaaagaatactgttaagagtgtcggtaaattttgtctagaggcttcatttaattatttgaagtcacctaatttttctaaactgataaatattataatttggtttttactattaagtgtttgcctaggttctttaatctactcaaccgctgctttaggtgttttaatgtctaatttaggcatgccttcttactgtactggttacagagaaggctatttgaactctactaatgtcactattgcaacctactgtactggttctataccttgtagtgtttgtcttagtggtttagattctttagacacctatccttctttagaaactatacaaattaccatttcatcttttaaatgggatttaactgcttttggcttagttgcagagtggtttttggcatatattcttttcactaggtttttctatgtacttggattggctgcaatcatgcaattgtttttcagctattttgcagtacattttattagtaattcttggcttatgtggttaataattaatcttgtacaaatggccccgatttcagctatggttagaatgtacatcttctttgcatcattttattatgtatggaaaagttatgtgcatgttgtagacggttgtaattcatcaacttgtatgatgtgttacaaacgtaatagagcaacaagagtcgaatgtacaactattgttaatggtgttagaaggtccttttatgtctatgctaatggaggtaaaggcttttgcaaactacacaattggaattgtgttaattgtgatacattctgtgctggtagtacatttattagtgatgaagttgcgagagacttgtcactacagtttaaaagaccaataaatcctactgaccagtcttcttacatcgttgatagtgttacagtgaagaatggttccatccatctttactttgataaagctggtcaaaagacttatgaaagacattctctctctcattttgttaacttagacaacctgagagctaataacactaaaggttcattgcctattaatgttatagtttttgatggtaaatcaaaatgtgaagaatcatctgcaaaatcagcgtctgtttactacagtcagcttatgtgtcaacctatactgttactagatcaggcattagtgtctgatgttggtgatagtgcggaagttgcagttaaaatgtttgatgcttacgttaatacgttttcatcaacttttaacgtaccaatggaaaaactcaaaacactagttgcaactgcagaagctgaacttgcaaagaatgtgtccttagacaatgtcttatctacttttatttcagcagctcggcaagggtttgttgattcagatgtagaaactaaagatgttgttgaatgtcttaaattgtcacatcaatctgacatagaagttactggcgatagttgtaataactatatgctcacctataacaaagttgaaaacatgacaccccgtgaccttggtgcttgtattgactgtagtgcgcgtcatattaatgcgcaggtagcaaaaagtcacaacattgctttgatatggaacgttaaagatttcatgtcattgtctgaacaactacgaaaacaaatacgtagtgctgctaaaaagaataacttaccttttaagttgacatgtgcaactactagacaagttgttaatgttgtaacaacaaagatagcacttaagggtggtaaaattgttaataattggttgaagcagttaattaaagttacacttgtgttcctttttgttgctgctattttctatttaataacacctgttcatgtcatgtctaaacatactgacttttcaagtgaaatcataggatacaaggctattgatggtggtgtcactcgtgacatagcatctacagatacttgttttgctaacaaacatgctgattttgacacatggtttagccagcgtggtggtagttatactaatgacaaagcttgcccattgattgctgcagtcataacaagagaagtgggttttgtcgtgcctggtttgcctggcacgatattacgcacaactaatggtgactttttgcatttcttacctagagtttttagtgcagttggtaacatctgttacacaccatcaaaacttatagagtacactgactttgcaacatcagcttgtgttttggctgctgaatgtacaatttttaaagatgcttctggtaagccagtaccatattgttatgataccaatgtactagaaggttctgttgcttatgaaagtttacgccctgacacacgttatgtgctcatggatggctctattattcaatttcctaacacctaccttgaaggttctgttagagtggtaacaacttttgattctgagtactgtaggcacggcacttgtgaaagatcagaagctggtgtttgtgtatctactagtggtagatgggtacttaacaatgattattacagatctttaccaggagttttctgtggtgtagatgctgtaaatttacttactaatatgtttacaccactaattcaacctattggtgctttggacatatcagcatctatagtagctggtggtattgtagctatcgtagtaacatgccttgcctactattttatgaggtttagaagagcttttggtgaatacagtcatgtagttgcctttaatactttactattccttatgtcattcactgtactctgtttaacaccagtttactcattcttacctggtgtttattctgttatttacttgtacttgacattttatcttactaatgatgtttcttttttagcacatattcagtggatggttatgttcacacctttagtacctttctggataacaattgcttatatcatttgtatttccacaaagcatttctattggttctttagtaattacctaaagagacgtgtagtctttaatggtgtttcctttagtacttttgaagaagctgcgctgtgcacctttttgttaaataaagaaatgtatctaaagttgcgtagtgatgtgctattacctcttacgcaatataatagatacttagctctttataataagtacaagtattttagtggagcaatggatacaactagctacagagaagctgcttgttgtcatctcgcaaaggctctcaatgacttcagtaactcaggttctgatgttctttaccaaccaccacaaacctctatcacctcagctgttttgcagagtggttttagaaaaatggcattcccatctggtaaagttgagggttgtatggtacaagtaacttgtggtacaactacacttaacggtctttggcttgatgacgtagtttactgtccaagacatgtgatctgcacctctgaagacatgcttaaccctaattatgaagatttactcattcgtaagtctaatcataatttcttggtacaggctggtaatgttcaactcagggttattggacattctatgcaaaattgtgtacttaagcttaaggttgatacagccaatcctaagacacctaagtataagtttgttcgcattcaaccaggacagactttttcagtgttagcttgttacaatggttcaccatctggtgtttaccaatgtgctatgaggcccaatttcactattaagggttcattccttaatggttcatgtggtagtgttggttttaacatagattatgactgtgtctctttttgttacatgcaccatatggaattaccaactggagttcatgctggcacagacttagaaggtaacttttatggaccttttgttgacaggcaaacagcacaagcagctggtacggacacaactattacagttaatgttttagcttggttgtacgctgctgttataaatggagacaggtggtttctcaatcgatttaccacaactcttaatgactttaaccttgtggctatgaagtacaattatgaacctctaacacaagaccatgttgacatactaggacctctttctgctcaaactggaattgccgttttagatatgtgtgcttcattaaaagaattactgcaaaatggtatgaatggacgtaccatattgggtagtgctttattagaagatgaatttacaccttttgatgttgttagacaatgctcaggtgttactttccaaagtgcagtgaaaagaacaatcaagggtacacaccactggttgttactcacaattttgacttcacttttagttttagtccagagtactcaatggtctttgttcttttttttgtatgaaaatgcctttttaccttttgctatgggtattattgctatgtctgcttttgcaatgatgtttgtcaaacataagcatgcatttctctgtttgtttttgttaccttctcttgccactgtagcttattttaatatggtctatatgcctgctagttgggtgatgcgtattatgacatggttggatatggttgatactagtttgtctggttttaagctaaaagactgtgttatgtatgcatcagctgtagtgttactaatccttatgacagcaagaactgtgtatgatgatggtgctaggagagtgtggacacttatgaatgtcttgacactcgtttataaagtttattatggtaatgctttagatcaagccatttccatgtgggctcttataatctctgttacttctaactactcaggtgtagttacaactgtcatgtttttggccagaggtattgtttttatgtgtgttgagtattgccctattttcttcataactggtaatacacttcagtgtataatgctagtttattgtttcttaggctatttttgtacttgttactttggcctcttttgtttactcaaccgctactttagactgactcttggtgtttatgattacttagtttctacacaggagtttagatatatgaattcacagggactactcccacccaagaatagcatagatgccttcaaactcaacattaaattgttgggtgttggtggcaaaccttgtatcaaagtagccactgtacagtctaaaatgtcagatgtaaagtgcacatcagtagtcttactctcagttttgcaacaactcagagtagaatcatcatctaaattgtgggctcaatgtgtccagttacacaatgacattctcttagctaaagatactactgaagcctttgaaaaaatggtttcactactttctgttttgctttccatgcagggtgctgtagacataaacaagctttgtgaagaaatgctggacaacagggcaaccttacaagctatagcctcagagtttagttcccttccatcatatgcagcttttgctactgctcaagaagcttatgagcaggctgttgctaatggtgattctgaagttgttcttaaaaagttgaagaagtctttgaatgtggctaaatctgaatttgaccgtgatgcagccatgcaacgtaagttggaaaagatggctgatcaagctatgacccaaatgtataaacaggctagatctgaggacaagagggcaaaagttactagtgctatgcagacaatgcttttcactatgcttagaaagttggataatgatgcactcaacaacattatcaacaatgcaagagatggttgtgttcccttgaacataatacctcttacaacagcagccaaactaatggttgtcataccagactataacacatataaaaatacgtgtgatggtacaacatttacttatgcatcagcattgtgggaaatccaacaggttgtagatgcagatagtaaaattgttcaacttagtgaaattagtatggacaattcacctaatttagcatggcctcttattgtaacagctttaagggccaattctgctgtcaaattacagaataatgagcttagtcctgttgcactacgacagatgtcttgtgctgccggtactacacaaactgcttgcactgatgacaatgcgttagcttactacaacacaacaaagggaggtaggtttgtacttgcactgttatccgatttacaggatttgaaatgggctagattccctaagagtgatggaactggtactatctatacagaactggaaccaccttgtaggtttgttacagacacacctaaaggtcctaaagtgaagtatttatactttattaaaggattaaacaacctaaatagaggtatggtacttggtagtttagctgccacagtacgtctacaagctggtaatgcaacagaagtgcctgccaattcaactgtattatctttctgtgcttttgctgtagatgctgctaaagcttacaaagattatctagctagtgggggacaaccaatcactaattgtgttaagatgttgtgtacacacactggtactggtcaggcaataacagttacaccggaagccaatatggatcaagaatcctttggtggtgcatcgtgttgtctgtactgccgttgccacatagatcatccaaatcctaaaggattttgtgacttaaaaggtaagtatgtacaaatacctacaacttgtgctaatgaccctgtgggttttacacttaaaaacacagtctgtaccgtctgcggtatgtggaaaggttatggctgtagttgtgatcaactccgcgaacccatgcttcagtcagctgatgcacaatcgtttttaaacgggtttgcggtgtaagtgcagcccgtcttacaccgtgcggcacaggcactagtactgatgtcgtatacagggcttttgacatctacaatgataaagtagctggttttgctaaattcctaaaaactaattgttgtcgcttccaagaaaaggacgaagatgacaatttaattgattcttactttgtagttaagagacacactttctctaactaccaacatgaagaaacaatttataatttacttaaggattgtccagctgttgctaaacatgacttctttaagtttagaatagacggtgacatggtaccacatatatcacgtcaacgtcttactaaatacacaatggcagacctcgtctatgctttaaggcattttgatgaaggtaattgtgacacattaaaagaaatacttgtcacatacaattgttgtgatgatgattatttcaataaaaaggactggtatgattttgtagaaaacccagatatattacgcgtatacgccaacttaggtgaacgtgtacgccaagctttgttaaaaacagtacaattctgtgatgccatgcgaaatgctggtattgttggtgtactgacattagataatcaagatctcaatggtaactggtatgatttcggtgatttcatacaaaccacgccaggtagtggagttcctgttgtagattcttattattcattgttaatgcctatattaaccttgaccagggctttaactgcagagtcacatgttgacactgacttaacaaagccttacattaagtgggatttgttaaaatatgacttcacggaagagaggttaaaactctttgaccgttattttaaatattgggatcagacataccacccaaattgtgttaactgtttggatgacagatgcattctgcattgtgcaaactttaatgttttattctctacagtgttcccacctacaagttttggaccactagtgagaaaaatatttgttgatggtgttccatttgtagtttcaactggataccacttcagagagctaggtgttgtacataatcaggatgtaaacttacatagctctagacttagttttaaggaattacttgtgtatgctgctgaccctgctatgcacgctgcttctggtaatctattactagataaacgcactacgtgcttttcagtagctgcacttactaacaatgttgcttttcaaactgtcaaacccggtaattttaacaaagacttctatgactttgctgtgtctaagggtttctttaaggaaggaagttctgttgaattaaaacacttcttctttgctcaggatggtaatgctgctatcagcgattatgactactatcgttataatctaccaacaatgtgtgatatcagacaactactatttgtagttgaagttgttgataagtactttgattgttacgatggtggctgtattaatgctaaccaagtcatcgtcaacaacctagacaaatcagctggttttccatttaataaatggggtaaggctagactttattatgattcaatgagttatgaggatcaagatgcacttttcgcatatacaaaacgtaatgtcatccctactataactcaaatgaatcttaagtatgccattagtgcaaagaatagagctcgcaccgtagctggtgtctctatctgtagtactatgaccaatagacagtttcatcaaaaattattgaaatcaatagccgccactagaggagctactgtagtaattggaacaagcaaattctatggtggttggcacaacatgttaaaaactgtttatagtgatgtagaaaaccctcaccttatgggttgggattatcctaaatgtgatagagccatgcctaacatgcttagaattatggcctcacttgttcttgctcgcaaacatacaacgtgttgtagcttgtcacaccgtttctatagattagctaatgagtgtgctcaagtattgagtgaaatggtcatgtgtggcggttcactatatgttaaaccaggtggaacctcatcaggagatgccacaactgcttatgctaatagtgtttttaacatttgtcaagctgtcacggccaatgttaatgcacttttatctactgatggtaacaaaattgccgataagtatgtccgcaatttacaacacagactttatgagtgtctctatagaaatagagatgttgacacagactttgtgaatgagttttacgcatatttgcgtaaacatttctcaatgatgatactctctgacgatgctgttgtgtgtttcaatagcacttatgcatctcaaggtctagtggctagcataaagaactttaagtcagttctttattatcaaaacaatgtttttatgtctgaagcaaaatgttggactgagactgaccttactaaaggacctcatgaattttgctctcaacatacaatgctagttaaacagggtgatgattatgtgtaccttccttacccagatccatcaagaatcctaggggccggctgttttgtagatgatatcgtaaaaacagatggtacacttatgattgaacggttcgtgtctttagctatagatgcttacccacttactaaacatcctaatcaggagtatgctgatgtctttcatttgtacttacaatacataagaaagctacatgatgagttaacaggacacatgttagacatgtattctgttatgcttactaatgataacacttcaaggtattgggaacctgagttttatgaggctatgtacacaccgcatacagtcttacaggctgttggggcttgtgttctttgcaattcacagacttcattaagatgtggtgcttgcatacgtagaccattcttatgttgtaaatgctgttacgaccatgtcatatcaacatcacataaattagtcttgtctgttaatccgtatgtttgcaatgctccaggttgtgatgtcacagatgtgactcaactttacttaggaggtatgagctattattgtaaatcacataaaccacccattagttttccattgtgtgctaatggacaagtttttggtttatataaaaatacatgtgttggtagcgataatgttactgactttaatgcaattgcaacatgtgactggacaaatgctggtgattacattttagctaacacctgtactgaaagactcaagctttttgcagcagaaacgctcaaagctactgaggagacatttaaactgtcttatggtattgctactgtacgtgaagtgctgtctgacagagaattacatctttcatgggaagttggtaaacctagaccaccacttaaccgaaattatgtctttactggttatcgtgtaactaaaaacagtaaagtacaaataggagagtacacctttgaaaaaggtgactatggtgatgctgttgtttaccgaggtacaacaacttacaaattaaatgttggtgattattttgtgctgacatcacatacagtaatgccattaagtgcacctacactagtgccacaagagcactatgttagaattactggcttatacccaacactcaatatctcagatgagttttctagcaatgttgcaaattatcaaaaggttggtatgcaaaagtattctacactccagggaccacctggtactggtaagagtcattttgctattggcctagctctctactacccttctgctcgcatagtgtatacagcttgctctcatgccgctgttgatgcactatgtgagaaggcattaaaatatttgcctatagataaatgtagtagaattatacctgcacgtgctcgtgtagagtgttttgataaattcaaagtgaattcaacattagaacagtatgtcttttgtactgtaaatgcattgcctgagacgacagcagatatagttgtctttgatgaaatttcaatggccacaaattatgatttgagtgttgtcaatgccagattacgtgctaagcactatgtgtacattggcgaccctgctcaattacctgcaccacgcacattgctaactaagggcacactagaaccagaatatttcaattcagtgtgtagacttatgaaaactataggtccagacatgttcctcggaacttgtcggcgttgtcctgctgaaattgttgacactgtgagtgctttggtttatgataataagcttaaagcacataaagacaaatcagctcaatgctttaaaatgttttataagggtgttatcacgcatgatgtttcatctgcaattaacaggccacaaataggcgtggtaagagaattccttacacgtaaccctgcttggagaaaagctgtctttatttcaccttataattcacagaatgctgtagcctcaaagattttgggactaccaactcaaactgttgattcatcacagggctcagaatatgactatgtcatattcactcaaaccactgaaacagctcactcttgtaatgtaaacagatttaatgttgctattaccagagcaaaagtaggcatactttgcataatgtctgatagagacctttatgacaagttgcaatttacaagtcttgaaattccacgtaggaatgtggcaactttacaagctgaaaatgtaacaggactctttaaagattgtagtaaggtaatcactgggttacatcctacacaggcacctacacacctcagtgttgacactaaattcaaaactgaaggtttatgtgttgacatacctggcatacctaaggacatgacctatagaagactcatctctatgatgggttttaaaatgaattatcaagttaatggttaccctaacatgtttatcacccgcgaagaagctataagacatgtacgtgcatggattggcttcgatgtcgaggggtgtcatgctactagagaagctgttggtaccaatttacctttacagctaggtttttctacaggtgttaacctagttgctgtacctacaggttatgttgatacacctaataatacagatttttccagagttagtgctaaaccaccgcctggagatcaatttaaacacctcataccacttatgtacaaaggacttccttggaatgtagtgcgtataaagattgtacaaatgttaagtgacacacttaaaaatctctctgacagagtcgtatttgtcttatgggcacatggctttgagttgacatctatgaagtattttgtgaaaataggacctgagcgcacctgttgtctatgtgatagacgtgccacatgcttttccactgcttcagacacttatgcctgttggcatcattctattggatttgattacgtctataatccgtttatgattgatgttcaacaatggggttttacaggtaacctacaaagcaaccatgatctgtattgtcaagtccatggtaatgcacatgtagctagttgtgatgcaatcatgactaggtgtctagctgtccacgagtgctttgttaagcgtgttgactggactattgaatatcctataattggtgatgaactgaagattaatgcggcttgtagaaaggttcaacacatggttgttaaagctgcattattagcagacaaattcccagttcttcacgacattggtaaccctaaagctattaagtgtgtacctcaagctgatgtagaatggaagttctatgatgcacagccttgtagtgacaaagcttataaaatagaagaattattctattcttatgccacacattctgacaaattcacagatggtgtatgcctattttggaattgcaatgtcgatagatatcctgctaattccattgtttgtagatttgacactagagtgctatctaaccttaacttgcctggttgtgatggtggcagtttgtatgtaaataaacatgcattccacacaccagcttttgataaaagtgcttttgttaatttaaaacaattaccatttttctattactctgacagtccatgtgagtctcatggaaaacaagtagtgtcagatatagattatgtaccactaaagtctgctacgtgtataacacgttgcaatttaggtggtgctgtctgtagacatcatgctaatgagtacagattgtatctcgatgcttataacatgatgatctcagctggctttagcttgtgggtttacaaacaatttgatacttataacctctggaacacttttacaagacttcagagtttagaaaatgtggcttttaatgttgtaaataagggacactttgatggacaacagggtgaagtaccagtttctatcattaataacactgtttacacaaaagttgatggtgttgatgtagaattgtttgaaaataaaacaacattacctgttaatgtagcatttgagctttgggctaagcgcaacattaaaccagtaccagaggtgaaaatactcaataatttgggtgtggacattgctgctaatactgtgatctgggactacaaaagagatgctccagcacatatatctactattggtgtttgttctatgactgacatagccaagaaaccaactgaaacgatttgtgcaccactcactgtcttttttgatggtagagttgatggtcaagtagacttatttagaaatgcccgtaatggtgttcttattacagaaggtagtgttaaaggtttacaaccatctgtaggtcccaaacaagctagtcttaatggagtcacattaattggagaagccgtaaaaacacagttcaattattataagaaagttgatggtgttgtccaacaattacctgaaacttactttactcagagtagaaatttacaagaatttaaacccaggagtcaaatggaaattgatttcttagaattagctatggatgaattcattgaacggtataaattagaaggctatgccttcgaacatatcgtttatggagattttagtcatagtcagttaggtggtttacatctactgattggactagctaaacgttttaaggaatcaccttttgaattagaagattttattcctatggacagtacagttaaaaactatttcataacagatgcgcaaacaggttcatctaagtgtgtgtgttctgttattgatttattacttgatgattttgttgaaataataaaatcccaagatttatctgtagtttctaaggttgtcaaagtgactattgactatacagaaatttcatttatgctttggtgtaaagatggccatgtagaaacattttacccaaaattacaatctagtcaagcgtggcaaccgggtgttgctatgcctaatctttacaaaatgcaaagaatgctattagaaaagtgtgaccttcaaaattatggtgatagtgcaacattacctaaaggcataatgatgaatgtcgcaaaatatactcaactgtgtcaatatttaaacacattaacattagctgtaccctataatatgagagttatacattttggtgctggttctgataaaggagttgcaccaggtacagctgttttaagacagtggttgcctacgggtacgctgcttgtcgattcagatcttaatgactttgtctctgatgcagattcaactttgattggtgattgtgcaactgtacatacagctaataaatgggatctcattattagtgatatgtacgaccctaagactaaaaatgttacaaaagaaaatgactctaaagagggttttttcacttacatttgtgggtttatacaacaaaagctagctcttggaggttccgtggctataaagataacagaacattcttggaatgctgatctttataagctcatgggacacttcgcatggtggacagcctttgttactaatgtgaatgcgtcatcatctgaagcatttttaattggatgtaattatcttggcaaaccacgcgaacaaatagatggttatgtcatgcatgcaaattacatattttggaggaatacaaatccaattcagttgtcttcctattctttatttgacatgagtaaatttccccttaaattaaggggtactgctgttatgtctttaaaagaaggtcaaatcaatgatatgattttatctcttcttagtaaaggtagacttataattagagaaaacaacagagttgttatttctagtgatgttcttgttaacaactaaacgaacaatggaagatgccaaaaacattaagaagggcccagcgccattctacccactcgaagacgggaccgccggcgagcagctgcacaaagccatgaagcgctacgccctggtgcccggcaccatcgcctttaccgacgcacatatcgaggtggacattacctacgccgagtacttcgagatgagcgttcggctggcagaagctatgaagcgctatgggctgaatacaaaccatcggatcgtggtgtgcagcgagaatagcttgcagttcttcatgcccgtgttgggtgccctgttcatcggtgtggctgtggccccagctaacgacatctacaacgagcgcgagctgctgaacagcatgggcatcagccagcccaccgtcgtattcgtgagcaagaaagggctgcaaaagatcctcaacgtgcaaaagaagctaccgatcatacaaaagatcatcatcatggatagcaagaccgactaccagggcttccaaagcatgtacaccttcgtgacttcccatttgccacccggcttcaacgagtacgacttcgtgcccgagagcttcgaccgggacaaaaccatcgccctgatcatgaacagtagtggcagtaccggattgcccaagggcgtagccctaccgcaccgcaccgcttgtgtccgattcagtcatgcccgcgaccccatcttcggcaaccagatcatccccgacaccgctatcctcagcgtggtgccatttcaccacggcttcggcatgttcaccacgctgggctacttgatctgcggctttcgggtcgtgctcatgtaccgcttcgaggaggagctattcttgcgcagcttgcaagactataagattcaatctgccctgctggtgcccacactatttagcttcttcgctaagagcactctcatcgacaagtacgacctaagcaacttgcacgagatcgccagcggcggggcgccgctcagcaaggaggtaggtgaggccgtggccaaacgcttccacctaccaggcatccgccagggctacggcctgacagaaacaaccagcgccattctgatcacccccgaaggggacgacaagcctggcgcagtaggcaaggtggtgcccttcttcgaggctaaggtggtggacttggacaccggtaagacactgggtgtgaaccagcgcggcgagctgtgcgtccgtggccccatgatcatgagcggctacgttaacaaccccgaggctacaaacgctctcatcgacaaggacggctggctgcacagcggcgacatcgcctactgggacgaggacgagcacttcttcatcgtggaccggctgaagagcctgatcaaatacaagggctaccaggtagccccagccgaactggagagcatcctgctgcaacaccccaacatcttcgacgccggggtcgccggcctgcccgacgacgatgccggcgagctgcccgccgcagtcgtcgtgctggaacacggtaaaaccatgaccgagaaggagatcgtggactatgtggccagccaggttacaaccgccaagaagctgcgcggtggtgttgtgttcgtggacgaggtgcctaaaggactgaccggcaagttggacgcccgcaagatccgcgagattctcattaaggccaagaagggcggcaagatcgccgtgcagtcgacggtaccgcgggcccgggatccaccggtcgccaccatggtgagcaagggcgaggagctgttcaccggggtggtgcccatcctggtcgagctggacggcgacgtaaacggccacaagttcagcgtgtccggcgagggcgagggcgatgccacctacggcaagctgaccctgaagttcatctgcaccaccggcaagctgcccgtgccctggcccaccctcgtgaccaccctgacctacggcgtgcagtgcttcagccgctaccccgaccacatgaagcagcacgacttcttcaagtccgccatgcccgaaggctacgtccaggagcgcaccatcttcttcaaggacgacggcaactacaagacccgcgccgaggtgaagttcgagggcgacaccctggtgaaccgcatcgagctgaagggcatcgacttcaaggaggacggcaacatcctggggcacaagctggagtacaactacaacagccacaacgtctatatcatggccgacaagcagaagaacggcatcaaggtgaacttcaagatccgccacaacatcgaggacggcagcgtgcagctcgccgaccactaccagcagaacacccccatcggcgacggccccgtgctgctgcccgacaaccactacctgagcacccagtccgccctgagcaaagaccccaacgagaagcgcgatcacatggtcctgctggagttcgtgaccgccgccgggatcactctcggcatggacgagctgtacaagtaaacgaacttatggatttgtttatgagaatcttcacaattggaactgtaactttgaagcaaggtgaaatcaaggatgctactccttcagattttgttcgcgctactgcaacgataccgatacaagcctcactccctttcggatggcttattgttggcgttgcacttcttgctgtttttcagagcgcttccaaaatcataaccctcaaaaagagatggcaactagcactctccaagggtgttcactttgtttgcaacttgctgttgttgtttgtaacagtttactcacaccttttgctcgttgctgctggccttgaagccccttttctctatctttatgctttagtctacttcttgcagagtataaactttgtaagaataataatgaggctttggctttgctggaaatgccgttccaaaaacccattactttatgatgccaactattttctttgctggcatactaattgttacgactattgtataccttacaatagtgtaacttcttcaattgtcattacttcaggtgatggcacaacaagtcctatttctgaacatgactaccagattggtggttatactgaaaaatgggaatctggagtaaaagactgtgttgtattacacagttacttcacttcagactattaccagctgtactcaactcaattgagtacagacactggtgttgaacatgttaccttcttcatctacaataaaattgttgatgagcctgaagaacatgtccaaattcacacaatcgacggttcatccggagttgttaatccagtaatggaaccaatttatgatgaaccgacgacgactactagcgtgcctttgtaagcacaagctgatgagtacgaacttatgatcgagcaggatggcctgcatgccggatctccagctgcctgggttgagagactgttcggctatgattgggcccagcagaccatcggctgttctgatgccgccgtgtttagactgagtgcccagggtagacccgtgctgttcgtgaaaaccgatctgtctggcgccctgaacgagctgcaggatgaagccgctagactgagctggctggctacaacaggcgtgccatgtgctgccgtgctggatgtggttacagaggccggaagagactggctgctgctgggagaagttccaggccaggatctgctgagcagtcatctggcccctgccgagaaggtgtccattatggccgatgccatgcggcggctgcacacacttgatcctgccacctgtcctttcgaccaccaagccaagcaccggatcgagagggccagaaccagaatggaagccggcctggtggaccaggacgacctggatgaagaacaccaaggactggccccagctgagctgttcgccagactgaaagccagaatgcccgacggcgaggatctggtggttacacatggggatgcctgcctgcctaacatcatggtggaaaacggccggttcagcggctttatcgactgtggcagactgggcgtcgccgacagatatcaggatatcgccctggccaccagagatatcgccgaagaacttggcggagagtgggccgatagattcctggtgctgtacggaatcgccgctcctgactctcagcggatcgccttctacagactgctggacgagttcttctgagtgacaacagatgtttcatctcgttgactttcaggttactatagcagagatattactaattattatgaggacttttaaagtttccatttggaatcttgattacatcataaacctcataattaaaaatttatctaagtcactaactgagaataaatattctcaattagatgaagagcaaccaatggagattgattaaacgaacatgaaaattattcttttcttggcactgataacactcgctacttgtgagctttatcactaccaagagtgtgttagaggtacaacagtacttttaaaagaaccttgctcttctggaacatacgagggcaattcaccatttcatcctctagctgataacaaatttgcactgacttgctttagcactcaatttgcttttgcttgtcctgacggcgtaaaacacgtctatcagttacgtgccagatcagtttcacctaaactgttcatcagacaagaggaagttcaagaactttactctccaatttttcttattgttgcggcaatagtgtttataacactttgcttcacactcaaaagaaagacagaatgattgaactttcattaattgacttctatttgtgctttttagcctttctgctattccttgttttaattatgcttattatcttttggttctcacttgaactgcaagatcataatgaaacttgtcacgcctaaacgaacatgaaatttcttgttttcttaggaatcatcacaactgtagctgcatttcaccaagaatgtagtttacagtcatgtactcaacatcaaccatatgtagttgatgacccgtgtcctattcacttctattctaaatggtatattagagtaggagctagaaaatcagcacctttaattgaattgtgcgtggatgaggctggttctaaatcacccattcagtacatcgatatcggtaattatacagtttcctgtttaccttttacaattaattgccaggaacctaaattgggtagtcttgtagtgcgttgttcgttctatgaagactttttagagtatcatgacgttcgtgttgttttagatttcatctaaacgaacaaactaaaatgtctgataatggaccccaaaatcagcgaaatgcaccccgcattacgtttggtggaccctcagattcaactggcagtaaccagaatggagaacgcagtggggcgcgatcaaaacaacgtcggccccaaggtttacccaataatactgcgtcttggttcaccgctctcactcaacatggcaaggaagaccttaaattccctcgaggacaaggcgttccaattaacaccaatagcagtccagatgaccaaattggctactaccgaagagctaccagacgaattcgtggtggtgacggtaaaatgaaagatctcagtccaagatggtatttctactacctaggaactgggccagaagctggacttccctatggtgctaacaaagacggcatcatatgggttgcaactgagggagccttgaatacaccaaaagatcacattggcacccgcaatcctgctaacaatgctgcaatcgtgctacaacttcctcaaggaacaacattgccaaaaggcttctacgcagaagggagcagaggcggcagtcaagcctcttctcgttcctcatcacgtagtcgcaacagttcaagaaattcaactccaggcagcagtaggggaacttctcctgctagaatggctggcaatggcggtgatgctgctcttgctttgctgctgcttgacagattgaaccagcttgagagcaaaatgtctggtaaaggccaacaacaacaaggccaaactgtcactaagaaatctgctgctgaggcttctaagaagcctcggcaaaaacgtactgccactaaagcatacaatgtaacacaagctttcggcagacgtggtccagaacaaacccaaggaaattttggggaccaggaactaatcagacaaggaactgattacaaacattggccgcaaattgcacaatttgcccccagcgcttcagcgttcttcggaatgtcgcgcattggcatggaagtcacaccttcgggaacgtggttgacctacacaggtgccatcaaattggatgacaaagatccaaatttcaaagatcaagtcattttgctgaataagcatattgacgcatacaaaacattcccaccaacagagcctaaaaaggacaaaaagaagaaggctgatgaaactcaagccttaccgcagagacagaagaaacagcaaactgtgactcttcttcctgctgcagatttggatgatttctccaaacaattgcaacaatccatgagcagtgctgactcaactcaggcctaaactcatgcagaccacacaaggcagatgggctatataaacgttttcgcttttccgtttacgatatatagtctactcttgtgcagaatgaattctcgtaactacatagcacaagtagatgtagttaactttaatctcacatagcaatctttaatcagtgtgtaacattagggaggacttgaaagagccaccacattttcaccgaggccacgcggagtacgatcgagtgtacagtgaacaatgctagggagagctgcctatatggaagagccctaatgtgtaaaattaattttagtagtgctatccccatgtgattttaatagcttcttaggagaatgacaaaaaaaaaaaaaaaaaaaaaaaaaagggtcggcatggcatctccacctcctcgcggtccgacctgggcatccgaaggaggacgcacgtccactcggatggctaagggagagcctgcagtagcataaccccttggggcctctaaacgggtcttgaggggttttttggcggccgcttctatagtgtcacctaaatactagtgactccagcgtaactggactggccacagttaggccgcaaatgtaatcacactggctcaccttcgggtgggcctttctgcgttcgcgagtggacccgataagctcatggagcggcgtaaccgtcgcacaggaaggacagagaaagcgcggatctgggaagtgacggacagaacggtcaggacctggattggggaggcggttgccgccgctgctgctgacggtgtgacgttctctgttccggtcacaccacatacgttccgccattcctatgcgatgcacatgctgtatgccggtataccgctgaaagttctgcaaagcctgatgggacataagtccatcagttcaacggaagtctacacgaaggtttttgcgctggatgtggctgcccggcaccgggtgcagtttgcgatgccggagtctgatgcggttgcgatgctgaaacaattatcctgagaataaatgccttggcctttatatggaaatgtggaactgagtggatatgctgtttttgtctgttaaacagagaagctggctgttatccactgagaagcgaacgaaacagtcgggaaaatctcccattatcgtagagatccgcattattaatctcaggagcctgtgtagcgtttataggaagtagtgttctgtcatgatgcctgcaagcggtaacgaaaacgatttgaatatgccttcaggaacaatagaaatcttcgtgcggtgttacgttgaagtggagcggattatgtcagcaatggacagaacaacctaatgaacacagaaccatgatgtggtctgtccttttacagccagtagtgctcgccgcagtcgagcgacagggcgaagccctcggctggttgccctcgccgctgggctggcggccgtctatggccctgcaaacgcgccagaaacgccgtcgaagccgtgtgcgagacaccgcggccggccgccggcgttgtggatacctcgcggaaaacttggccctcactgacagatgaggggcggacgttgacacttgaggggccgactcacccggcgcggcgttgacagatgaggggcaggctcgatttcggccggcgacgtggagctggccagcctcgcaaatcggcgaaaacgcctgattttacgcgagtttcccacagatgatgtggacaagcctggggataagtgccctgcggtattgacacttgaggggcgcgactactgacagatgaggggcgcgatccttgacacttgaggggcagagtgctgacagatgaggggcgcacctattgacatttgaggggctgtccacaggcagaaaatccagcatttgcaagggtttccgcccgtttttcggccaccgctaacctgtcttttaacctgcttttaaaccaatatttataaaccttgtttttaaccagggctgcgccctgtgcgcgtgaccgcgcacgccgaaggggggtgcccccccttctcgaaccctcccggtcgagtgagcgaggaagcaccagggaacagcacttatatattctgcttacacacgatgcctgaaaaaacttcccttggggttatccacttatccacggggatatttttataattattttttttatagtttttagatcttcttttttagagcgccttgtaggcctttatccatgctggttctagagaaggtgttgtgacaaattgccctttcagtgtgacaaatcaccctcaaatgacagtcctgtctgtgacaaattgcccttaaccctgtgacaaattgccctcagaagaagctgttttttcacaaagttatccctgcttattgactcttttttatttagtgtgacaatctaaaaacttgtcacacttcacatggatctgtcatggcggaaacagcggttatcaatcacaagaaacgtaaaaatagcccgcgaatcgtccagtcaaacgacctcactgaggcggcatatagtctctcccgggatcaaaaacgtatgctgtatctgttcgttgaccagatcagaaaatctgatggcaccctacaggaacatgacggtatctgcgagatccatgttgctaaatatgctgaaatattcggattgacctctgcggaagccagtaaggatatacggcaggcattgaagagtttcgcggggaaggaagtggttttttatcgccctgaagaggatgccggcgatgaaaaaggctatgaatcttttccttggtttatcaaacgtgcgcacagtccatccagagggctttacagtgtacatatcaacccatatctcattcccttctttatcgggttacagaaccggtttacgcagtttcggcttagtgaaacaaaagaaatcaccaatccgtatgccatgcgtttatacgaatccctgtgtcagtatcgtaagccggatggctcaggcatcgtctctctgaaaatcgactggatcatagagcgttaccagctgcctcaaagttaccagcgtatgcctgacttccgccgccgcttcctgcaggtctgtgttaatgagatcaacagcagaactccaatgcgcctctcatacattgagaaaaagaaaggccgccagacgactcatatcgtattttccttccgcgatatcacttccatgacgacaggatagtctgagggttatctgtcacagatttgagggtggttcgtcacatttgttctgacctactgagggtaatttgtcacagttttgctgtttccttcagcctgcatggattttctcatactttttgaactgtaatttttaaggaagccaaatttgagggcagtttgtcacagttgatttccttctctttcccttcgtcatgtgacctgatatcgggggttagttcgtcatcattgatgagggttgattatcacagtttattactctgaattggctatccgcgtgtgtacctctacctggagtttttcccacggtggatatttcttcttgcgctgagcgtaagagctatctgacagaacagttcttctttgcttcctcgccagttcgctcgctatgctcggttacacggctgcggcgagcgctagtgataataagtgactgaggtatgtgctcttcttatctccttttgtagtgttgctcttattttaaacaactttgcggttttttgatgactttgcgattttgttgttgctttgcagtaaattgcaagatttaataaaaaaacgcaaagcaatgattaaaggatgttcagaatgaaactcatggaaacacttaaccagtgcataaacgctggtcatgaaatgacgaaggctatcgccattgcacagtttaatgatgacagcccggaagcgaggaaaataacccggcgctggagaataggtgaagcagcggatttagttggggtttcttctcaggctatcagagatgccgagaaagcagggcgactaccgcacccggatatggaaattcgaggacgggttgagcaacgtgttggttatacaattgaacaaattaatcatatgcgtgatgtgtttggtacgcgattgcgacgtgctgaagacgtatttccaccggtgatcggggttgctgcccataaaggaggcgtttacaaaacctcagtttctgttcatcttgctcaggatctggctctgaaggggctacgtgttttgctcgtggaaggtaacgacccccagggaacagcctcaatgtatcacggatgggtaccagatcttcatattcatgcagaagacactctcctgcctttctatcttggggaaaaggacgatgtcacttatgcaataaagcccacttgctggccggggcttgacattattccttcctgtctggctctgcaccgtattgaaactgagttaatgggcaaatttgatgaaggtaaactgcccaccgatccacacctgatgctccgactggccattgaaactgttgctcatgactatgatgtcatagttattgacagcgcgcctaacctgggtatcggcacgattaatgtcgtatgtgctgctgatgtgctgattgttcccacgcctgctgagttgtttgactacacctccgcactgcagtttttcgatatgcttcgtgatctgctcaagaacgttgatcttaaagggttcgagcctgatgtacgtattttgcttaccaaatacagcaatagtaatggctctcagtccccgtggatggaggagcaaattcgggatgcctggggaagcatggttctaaaaaatgttgtacgtgaaacggatgaagttggtaaaggtcagatccggatgagaactgtttttgaacaggccattgatcaacgctcttcaactggtgcctggagaaatgctctttctatttgggaacctgtctgcaatgaaattttcgatcgtctgattaaaccacgctgggagattagataatgaagcgtgcgcctgttattccaaaacatacgctcaatactcaaccggttgaagatacttcgttatcgacaccagctgccccgatggtggattcgttaattgcgcgcgtaggagtaatggctcgcggtaatgccattactttgcctgtatgtggtcgggatgtgaagtttactcttgaagtgctccggggtgatagtgttgagaagacctctcgggtatggtcaggtaatgaacgtgaccaggagctgcttactgaggacgcactggatgatctcatcccttcttttctactgactggtcaacagacaccggcgttcggtcgaagagtatctggtgtcatagaaattgccgatgggagtcgccgtcgtaaagctgctgcacttaccgaaagtgattatcgtgttctggttggcgagctggatgatgagcagatggctgcattatccagattgggtaacgattatcgcccaacaagtgcttatgaacgtggtcagcgttatgcaagccgattgcagaatgaatttgctggaaatatttctgcgctggctgatgcggaaaatatttcacgtaagattattacccgctgtatcaacaccgccaaattgcctaaatcagttgttgctcttttttctcaccccggtgaactatctgcccggtcaggtgatgcacttcaaaaagcctttacagataaagaggaattacttaagcagcaggcatctaaccttcatgagcagaaaaaagctggggtgatatttgaagctgaagaagttatcactcttttaacttctgtgcttaaaacgtcatctgcatcaagaactagtttaagctcacgacatcagtttgctcctggagcgacagtattgtataagggcgataaaatggtgcttaacctggacaggtctcgtgttccaactgagtgtatagagaaaattgaggccattcttaaggaacttgaaaagccagcaccctgatgcgaccacgttttagtctacgtttatctgtctttacttaatgtcctttgttacaggccagaaagcataactggcctgaatattctctctgggcccactgttccacttgtatcgtcggtctgataatcagactgggaccacggtcccactcgtatcgtcggtctgattattagtctgggaccacggtcccactcgtatcgtcggtctgattattagtctgggaccacggtcccactcgtatcgtcggtctgataatcagactgggaccacggtcccactcgtatcgtcggtctgattattagtctgggaccatggtcccactcgtatcgtcggtctgattattagtctgggaccacggtcccactcgtatcgtcggtctgattattagtctggaaccacggtcccactcgtatcgtcggtctgattattagtctgggaccacggtcccactcgtatcgtcggtctgattattagtctgggaccacgatcccactcgtgttgtcggtctgattatcggtctgggaccacggtcccacttgtattgtcgatcagactatcagcgtgagactacgattccatcaatgcctgtcaagggcaagtattgacatggtcgtcgtaacctgtagaacggagtaacctcggtgtgcggttgtatgcctgctgtggattgctgctgtgtcctgcttatccacaacattttgcgcacggttatgtggacaaaatacctggttacccaggccgtgccggcacgttaaccgggctgcatccgatgcaagtgtgtcgctgtcgacgagctcgcgagctcggacatgaggttgccccgtattcagtgtcgctgatttgtattgtctgaagttgcttttacgttaagttgatgcagatcaattaatacgatacctgcgtcataattgattatttgacgtggtttgatggcctccacgcacgttgtgatatgtagatgataatcattatcactttacgggtcctttccggtgatccgacaggttacggggcggcgacctcgcgggttttcgctatttatgaaaattttccggtttaaggcgtttccgttcttcttcgtcataacttaatgtttttatttaaaataccctctgaaaagaaaggaaacgacaggtgctgaaagcgagctttttggcctctgtcgtttcctttctctgtttttgtccgtggaatgaacaatggaagtccgagctcatcgctaataacttcgtatagcatacattatacgaagttatattcgatgcggccgatctagcagaaagtcaaaagcctccgaccggaggcttttgacttctgtcacctaggttacgccccgccctgccactcatcgcagtactgttgtaattcattaagcattctgccgacatggaagccatcacaaacggcatgatgaacctgaatcgccagcggcatcagcaccttgtcgccttgcgtataatatttgcccatggtgaaaacgggggcgaagaagttgtccatattggccacgtttaaatcaaaactggtgaaactcacccagggattggctgagacgaaaaacatattctcaataaaccctttagggaaataggccaggttttcaccgtaacacgccacatcttgcgaatatatgtgtagaaactgccggaaatcgtcgtggtattcactccagagcgatgaaaacgtttcagtttgctcatggaaaacggtgtaacaagggtgaacactatcccatatcaccagctcaccgtctttcattgccatacgaaattccggatgagcattcatcaggcgggcaagaatgtgaataaaggccggataaaacttgtgcttatttttctttacggtctttaaaaaggccgtaatatccagctgaacggtctggttataggtacattgagcaactgactgaaatgcctcaaaatgttctttacgatgccattgggatatatcaacggtggtatatccagtgatttttttctccattttagcttccttagctcctgaaaatctcgataactcaaaaaatacgcccggtagtgatcttatttcattatggtgaaagttggaacctcttacgtgccgatcagattaaaacgaaaggcccagtctttcgactgagcctttcgttttatttgaccatgttggtatgatttcgcatcagattggctattggccattgcatacgttgtatccatatcataatatgtacatttatattggctcatgtccaacattaccgccatgttgacattgattattgactagttattaatagtaatcaattacggggtcattagttcatagcccatatatggagttccgcgttacataacttacggtaaatggcccgcctggctgaccgcccaacgacccccgcccattgacgtcaataatgacgtatgttcccatagtaacgccaatagggactttccattgacgtcaatgggtggagtatttacggtaaactgcccacttggcagtacatcaagtgtatcatatgccaagtacgccccctattgacgtcaatgacggtaaatggcccgcctggcattatgcccagtacatgaccttatgggactttcctacttggcagtacatctacgtattagtcatcgctattaccatggtgatgcggttttggcagtacatcaatgggcgtggatagcggtttgactcacggggatttccaagtctccaccccattgacgtcaatgggagtttgttttggcaccaaaatcaacgggactttccaaaatgtcgtaacaactccgccccattgacgcaaatgggcggtaggcgtgtacggtgggaggtctatataagcagagctcgtttagtgaaccgtcagatcgcctggagacgccatccacgctgttttgacctccatagaagacaccgggaccgatccagcctccgcggccgggaacggtgcattggaacgcggattccccgtgccaagagtgacgtaagtacaaattcagt

SEQ ID NO: 4 - DNA, 36019 bp, Artificial Sequence
  T7GG-scv2-luc-GFP replicon
taatacgactcactataggattaaaggtttataccttcccaggtaacaaaccaaccaactttcgatctcttgtagatctgttctctaaacgaactttaaaatctgtgtggctgtcactcggctgcatgcttagtgcactcacgcagtataattaataactaattactgtcgttgacaggacacgagtaactcgtctatcttctgcaggctgcttacggtttcgtccgtgttgcagccgatcatcagcacatctaggtttcgtccgggtgtgaccgaaaggtaagatggagagccttgtccctggtttcaacgagaaaacacacgtccaactcagtttgcctgttttacaggttcgcgacgtgctcgtacgtggctttggagactccgtggaggaggtcttatcagaggcacgtcaacatcttaaagatggcacttgtggcttagtagaagttgaaaaaggcgttttgcctcaacttgaacagccctatgtgttcatcaaacgttcggatgctcgaactgcacctcatggtcatgttatggttgagctggtagcagaactcgaaggcattcagtacggtcgtagtggtgagacacttggtgtccttgtccctcatgtgggcgaaataccagtggcttaccgcaaggttcttcttcgtaagaacggtaataaaggagctggtggccatagttacggcgccgatctaaagtcatttgacttaggcgacgagcttggcactgatccttatgaagattttcaagaaaactggaacactaaacatagcagtggtgttacccgtgaactcatgcgtgagcttaacggaggggcatacactcgctatgtcgataacaacttctgtggccctgatggctaccctcttgagtgcattaaagaccttctagcacgtgctggtaaagcttcatgcactttgtccgaacaactggactttattgacactaagaggggtgtatactgctgccgtgaacatgagcatgaaattgcttggtacacggaacgttctgaaaagagctatgaattgcagacaccttttgaaattaaattggcaaagaaatttgacaccttcaatggggaatgtccaaattttgtatttcccttaaattccataatcaagactattcaaccaagggttgaaaagaaaaagcttgatggctttatgggtagaattcgatctgtctatccagttgcgtcaccaaatgaatgcaaccaaatgtgcctttcaactctcatgaagtgtgatcattgtggtgaaacttcatggcagacgggcgattttgttaaagccacttgcgaattttgtggcactgagaatttgactaaagaaggtgccactacttgtggttacttaccccaaaatgctgttgttaaaatttattgtccagcatgtcacaattcagaagtaggacctgagcatagtcttgccgaataccataatgaatctggcttgaaaaccattcttcgtaagggtggtcgcactattgcctttggaggctgtgtgttctcttatgttggttgccataacaagtgtgcctattgggttccacgtgctagcgctaacataggttgtaaccatacaggtgttgttggagaaggttccgaaggtcttaatgacaaccttcttgaaatactccaaaaagagaaagtcaacatcaatattgttggtgactttaaacttaatgaagagatcgccattattttggcatctttttctgcttccacaagtgcttttgtggaaactgtgaaaggtttggattataaagcattcaaacaaattgttgaatcctgtggtaattttaaagttacaaaaggaaaagctaaaaaaggtgcctggaatattggtgaacagaaatcaatactgagtcctctttatgcatttgcatcagaggctgctcgtgttgtacgatcaattttctcccgcactcttgaaactgctcaaaattctgtgcgtgttttacagaaggccgctataacaatactagatggaatttcacagtattcactgagactcattgatgctatgatgttcacatctgatttggctactaacaatctagttgtaatggcctacattacaggtggtgttgttcagttgacttcgcagtggctaactaacatctttggcactgtttatgaaaaactcaaacccgtccttgattggcttgaagagaagtttaaggaaggtgtagagtttcttagagacggttgggaaattgttaaatttatctcaacctgtgcttgtgaaattgtcggtggacaaattgtcacctgtgcaaaggaaattaaggagagtgttcagacattctttaagcttgtaaataaatttttggctttgtgtgctgactctatcattattggtggagctaaacttaaagccttgaatttaggtgaaacatttgtcacgcactcaaagggattgtacagaaagtgtgttaaatccagagaagaaactggcctactcatgcctctaaaagccccaaaagaaattatcttcttagagggagaaacacttcccacagaagtgttaacagaggaagttgtcttgaaaactggtgatttacaaccattagaacaacctactagtgaagctgttgaagctccattggttggtacaccagtttgtattaacgggcttatgttgctcgaaatcaaagacacagaaaagtactgtgcccttgcacctaatatgatggtaacaaacaataccttcacactcaaaggcggtgcaccaacaaaggttacttttggtgatgacactgtgatagaagtgcaaggttacaagagtgtgaatatcacttttgaacttgatgaaaggattgataaagtacttaatgagaagtgctctgcctatacagttgaactcggtacagaagtaaatgagttcgcctgtgttgtggcagatgctgtcataaaaactttgcaaccagtatctgaattacttacaccactgggcattgatttagatgagtggagtatggctacatactacttatttgatgagtctggtgagtttaaattggcttcacatatgtattgttctttctaccctccagatgaggatgaagaagaaggtgattgtgaagaagaagagtttgagccatcaactcaatatgagtatggtactgaagatgattaccaaggtaaacctttggaatttggtgccacttctgctgctcttcaacctgaagaagagcaagaagaagattggttagatgatgatagtcaacaaactgttggtcaacaagacggcagtgaggacaatcagacaactactattcaaacaattgttgaggttcaacctcaattagagatggaacttacaccagttgttcagactattgaagtgaatagttttagtggttatttaaaacttactgacaatgtatacattaaaaatgcagacattgtggaagaagctaaaaaggtaaaaccaacagtggttgttaatgcagccaatgtttaccttaaacatggaggaggtgttgcaggagccttaaataaggctactaacaatgccatgcaagttgaatctgatgattacatagctactaatggaccacttaaagtgggtggtagttgtgttttaagcggacacaatcttgctaaacactgtcttcatgttgtcggcccaaatgttaacaaaggtgaagacattcaacttcttaagagtgcttatgaaaattttaatcagcacgaagttctacttgcaccattattatcagctggtatttttggtgctgaccctatacattctttaagagtttgtgtagatactgttcgcacaaatgtctacttagctgtctttgataaaaatctctatgacaaacttgtttcaagctttttggaaatgaagagtgaaaagcaagttgaacaaaagatcgctgagattcctaaagaggaagttaagccatttataactgaaagtaaaccttcagttgaacagagaaaacaagatgataagaaaatcaaagcttgtgttgaagaagttacaacaactctggaagaaactaagttcctcacagaaaacttgttactttatattgacattaatggcaatcttcatccagattctgccactcttgttagtgacattgacatcactttcttaaagaaagatgctccatatatagtgggtgatgttgttcaagagggtgttttaactgctgtggttatacctactaaaaaggctggtggcactactgaaatgctagcgaaagctttgagaaaagtgccaacagacaattatataaccacttacccgggtcagggtttaaatggttacactgtagaggaggcaaagacagtgcttaaaaagtgtaaaagtgccttttacattctaccatctattatctctaatgagaagcaagaaattcttggaactgtttcttggaatttgcgagaaatgcttgcacatgcagaagaaacacgcaaattaatgcctgtctgtgtggaaactaaagccatagtttcaactatacagcgtaaatataagggtattaaaatacaagagggtgtggttgattatggtgctagattttacttttacaccagtaaaacaactgtagcgtcacttatcaacacacttaacgatctaaatgaaactcttgttacaatgccacttggctatgtaacacatggcttaaatttggaagaagctgctcggtatatgagatctctcaaagtgccagctacagtttctgtttcttcacctgatgctgttacagcgtataatggttatcttacttcttcttctaaaacacctgaagaacattttattgaaaccatctcacttgctggttcctataaagattggtcctattctggacaatctacacaactaggtatagaatttcttaagagaggtgataaaagtgtatattacactagtaatcctaccacattccacctagatggtgaagttatcacctttgacaatcttaagacacttctttctttgagagaagtgaggactattaaggtgtttacaacagtagacaacattaacctccacacgcaagttgtggacatgtcaatgacatatggacaacagtttggtccaacttatttggatggagctgatgttactaaaataaaacctcataattcacatgaaggtaaaacattttatgttttacctaatgatgacactctacgtgttgaggcttttgagtactaccacacaactgatcctagttttctgggtaggtacatgtcagcattaaatcacactaaaaagtggaaatacccacaagttaatggtttaacttctattaaatgggcagataacaactgttatcttgccactgcattgttaacactccaacaaatagagttgaagtttaatccacctgctctacaagatgcttattacagagcaagggctggtgaagctgctaacttttgtgcacttatcttagcctactgtaataagacagtaggtgagttaggtgatgttagagaaacaatgagttacttgtttcaacatgccaatttagattcttgcaaaagagtcttgaacgtggtgtgtaaaacttgtggacaacagcagacaacccttaagggtgtagaagctgttatgtacatgggcacactttcttatgaacaatttaagaaaggtgttcagataccttgtacgtgtggtaaacaagctacaaaatatctagtacaacaggagtcaccttttgttatgatgtcagcaccacctgctcagtatgaacttaagcatggtacatttacttgtgctagtgagtacactggtaattaccagtgtggtcactataaacatataacttctaaagaaactttgtattgcatagacggtgctttacttacaaagtcctcagaatacaaaggtcctattacggatgttttctacaaagaaaacagttacacaacaaccataaaaccagttacttataaattggatggtgttgtttgtacagaaattgaccctaagttggacaattattataagaaagacaattcttatttcacagagcaaccaattgatcttgtaccaaaccaaccatatccaaacgcaagcttcgataattttaagtttgtatgtgataatatcaaatttgctgatgatttaaaccagttaactggttataagaaacctgcttcaagagagcttaaagttacatttttccctgacttaaatggtgatgtggtggctattgattataaacactacacaccctcttttaagaaaggagctaaattgttacataaacctattgtttggcatgttaacaatgcaactaataaagccacgtataaaccaaatacctggtgtatacgttgtctttggagcacaaaaccagttgaaacatcaaattcgtttgatgtactgaagtcagaggacgcgcagggaatggataatcttgcctgcgaagatctaaaaccagtctctgaagaagtagtggaaaatcctaccatacagaaagacgttcttgagtgtaatgtgaaaactaccgaagttgtaggagacattatacttaaaccagcaaataatagtttaaaaattacagaagaggttggccacacagatctaatggctgcttatgtagacaattctagtcttactattaagaaacctaatgaattatctagagtattaggtttgaaaacccttgctactcatggtttagctgctgttaatagtgtcccttgggatactatagctaattatgctaagccttttcttaacaaagttgttagtacaactactaacatagttacacggtgtttaaaccgtgtttgtactaattatatgccttatttctttactttattgctacaattgtgtacttttactagaagtacaaattctagaattaaagcatctatgccgactactatagcaaagaatactgttaagagtgtcggtaaattttgtctagaggcttcatttaattatttgaagtcacctaatttttctaaactgataaatattataatttggtttttactattaagtgtttgcctaggttctttaatctactcaaccgctgctttaggtgttttaatgtctaatttaggcatgccttcttactgtactggttacagagaaggctatttgaactctactaatgtcactattgcaacctactgtactggttctataccttgtagtgtttgtcttagtggtttagattctttagacacctatccttctttagaaactatacaaattaccatttcatcttttaaatgggatttaactgcttttggcttagttgcagagtggtttttggcatatattcttttcactaggtttttctatgtacttggattggctgcaatcatgcaattgtttttcagctattttgcagtacattttattagtaattcttggcttatgtggttaataattaatcttgtacaaatggccccgatttcagctatggttagaatgtacatcttctttgcatcattttattatgtatggaaaagttatgtgcatgttgtagacggttgtaattcatcaacttgtatgatgtgttacaaacgtaatagagcaacaagagtcgaatgtacaactattgttaatggtgttagaaggtccttttatgtctatgctaatggaggtaaaggcttttgcaaactacacaattggaattgtgttaattgtgatacattctgtgctggtagtacatttattagtgatgaagttgcgagagacttgtcactacagtttaaaagaccaataaatcctactgaccagtcttcttacatcgttgatagtgttacagtgaagaatggttccatccatctttactttgataaagctggtcaaaagacttatgaaagacattctctctctcattttgttaacttagacaacctgagagctaataacactaaaggttcattgcctattaatgttatagtttttgatggtaaatcaaaatgtgaagaatcatctgcaaaatcagcgtctgtttactacagtcagcttatgtgtcaacctatactgttactagatcaggcattagtgtctgatgttggtgatagtgcggaagttgcagttaaaatgtttgatgcttacgttaatacgttttcatcaacttttaacgtaccaatggaaaaactcaaaacactagttgcaactgcagaagctgaacttgcaaagaatgtgtccttagacaatgtcttatctacttttatttcagcagctcggcaagggtttgttgattcagatgtagaaactaaagatgttgttgaatgtcttaaattgtcacatcaatctgacatagaagttactggcgatagttgtaataactatatgctcacctataacaaagttgaaaacatgacaccccgtgaccttggtgcttgtattgactgtagtgcgcgtcatattaatgcgcaggtagcaaaaagtcacaacattgctttgatatggaacgttaaagatttcatgtcattgtctgaacaactacgaaaacaaatacgtagtgctgctaaaaagaataacttaccttttaagttgacatgtgcaactactagacaagttgttaatgttgtaacaacaaagatagcacttaagggtggtaaaattgttaataattggttgaagcagttaattaaagttacacttgtgttcctttttgttgctgctattttctatttaataacacctgttcatgtcatgtctaaacatactgacttttcaagtgaaatcataggatacaaggctattgatggtggtgtcactcgtgacatagcatctacagatacttgttttgctaacaaacatgctgattttgacacatggtttagccagcgtggtggtagttatactaatgacaaagcttgcccattgattgctgcagtcataacaagagaagtgggttttgtcgtgcctggtttgcctggcacgatattacgcacaactaatggtgactttttgcatttcttacctagagtttttagtgcagttggtaacatctgttacacaccatcaaaacttatagagtacactgactttgcaacatcagcttgtgttttggctgctgaatgtacaatttttaaagatgcttctggtaagccagtaccatattgttatgataccaatgtactagaaggttctgttgcttatgaaagtttacgccctgacacacgttatgtgctcatggatggctctattattcaatttcctaacacctaccttgaaggttctgttagagtggtaacaacttttgattctgagtactgtaggcacggcacttgtgaaagatcagaagctggtgtttgtgtatctactagtggtagatgggtacttaacaatgattattacagatctttaccaggagttttctgtggtgtagatgctgtaaatttacttactaatatgtttacaccactaattcaacctattggtgctttggacatatcagcatctatagtagctggtggtattgtagctatcgtagtaacatgccttgcctactattttatgaggtttagaagagcttttggtgaatacagtcatgtagttgcctttaatactttactattccttatgtcattcactgtactctgtttaacaccagtttactcattcttacctggtgtttattctgttatttacttgtacttgacattttatcttactaatgatgtttcttttttagcacatattcagtggatggttatgttcacacctttagtacctttctggataacaattgcttatatcatttgtatttccacaaagcatttctattggttctttagtaattacctaaagagacgtgtagtctttaatggtgtttcctttagtacttttgaagaagctgcgctgtgcacctttttgttaaataaagaaatgtatctaaagttgcgtagtgatgtgctattacctcttacgcaatataatagatacttagctctttataataagtacaagtattttagtggagcaatggatacaactagctacagagaagctgcttgttgtcatctcgcaaaggctctcaatgacttcagtaactcaggttctgatgttctttaccaaccaccacaaacctctatcacctcagctgttttgcagagtggttttagaaaaatggcattcccatctggtaaagttgagggttgtatggtacaagtaacttgtggtacaactacacttaacggtctttggcttgatgacgtagtttactgtccaagacatgtgatctgcacctctgaagacatgcttaaccctaattatgaagatttactcattcgtaagtctaatcataatttcttggtacaggctggtaatgttcaactcagggttattggacattctatgcaaaattgtgtacttaagcttaaggttgatacagccaatcctaagacacctaagtataagtttgttcgcattcaaccaggacagactttttcagtgttagcttgttacaatggttcaccatctggtgtttaccaatgtgctatgaggcccaatttcactattaagggttcattccttaatggttcatgtggtagtgttggttttaacatagattatgactgtgtctctttttgttacatgcaccatatggaattaccaactggagttcatgctggcacagacttagaaggtaacttttatggaccttttgttgacaggcaaacagcacaagcagctggtacggacacaactattacagttaatgttttagcttggttgtacgctgctgttataaatggagacaggtggtttctcaatcgatttaccacaactcttaatgactttaaccttgtggctatgaagtacaattatgaacctctaacacaagaccatgttgacatactaggacctctttctgctcaaactggaattgccgttttagatatgtgtgcttcattaaaagaattactgcaaaatggtatgaatggacgtaccatattgggtagtgctttattagaagatgaatttacaccttttgatgttgttagacaatgctcaggtgttactttccaaagtgcagtgaaaagaacaatcaagggtacacaccactggttgttactcacaattttgacttcacttttagttttagtccagagtactcaatggtctttgttcttttttttgtatgaaaatgcctttttaccttttgctatgggtattattgctatgtctgcttttgcaatgatgtttgtcaaacataagcatgcatttctctgtttgtttttgttaccttctcttgccactgtagcttattttaatatggtctatatgcctgctagttgggtgatgcgtattatgacatggttggatatggttgatactagtttgtctggttttaagctaaaagactgtgttatgtatgcatcagctgtagtgttactaatccttatgacagcaagaactgtgtatgatgatggtgctaggagagtgtggacacttatgaatgtcttgacactcgtttataaagtttattatggtaatgctttagatcaagccatttccatgtgggctcttataatctctgttacttctaactactcaggtgtagttacaactgtcatgtttttggccagaggtattgtttttatgtgtgttgagtattgccctattttcttcataactggtaatacacttcagtgtataatgctagtttattgtttcttaggctatttttgtacttgttactttggcctcttttgtttactcaaccgctactttagactgactcttggtgtttatgattacttagtttctacacaggagtttagatatatgaattcacagggactactcccacccaagaatagcatagatgccttcaaactcaacattaaattgttgggtgttggtggcaaaccttgtatcaaagtagccactgtacagtctaaaatgtcagatgtaaagtgcacatcagtagtcttactctcagttttgcaacaactcagagtagaatcatcatctaaattgtgggctcaatgtgtccagttacacaatgacattctcttagctaaagatactactgaagcctttgaaaaaatggtttcactactttctgttttgctttccatgcagggtgctgtagacataaacaagctttgtgaagaaatgctggacaacagggcaaccttacaagctatagcctcagagtttagttcccttccatcatatgcagcttttgctactgctcaagaagcttatgagcaggctgttgctaatggtgattctgaagttgttcttaaaaagttgaagaagtctttgaatgtggctaaatctgaatttgaccgtgatgcagccatgcaacgtaagttggaaaagatggctgatcaagctatgacccaaatgtataaacaggctagatctgaggacaagagggcaaaagttactagtgctatgcagacaatgcttttcactatgcttagaaagttggataatgatgcactcaacaacattatcaacaatgcaagagatggttgtgttcccttgaacataatacctcttacaacagcagccaaactaatggttgtcataccagactataacacatataaaaatacgtgtgatggtacaacatttacttatgcatcagcattgtgggaaatccaacaggttgtagatgcagatagtaaaattgttcaacttagtgaaattagtatggacaattcacctaatttagcatggcctcttattgtaacagctttaagggccaattctgctgtcaaattacagaataatgagcttagtcctgttgcactacgacagatgtcttgtgctgccggtactacacaaactgcttgcactgatgacaatgcgttagcttactacaacacaacaaagggaggtaggtttgtacttgcactgttatccgatttacaggatttgaaatgggctagattccctaagagtgatggaactggtactatctatacagaactggaaccaccttgtaggtttgttacagacacacctaaaggtcctaaagtgaagtatttatactttattaaaggattaaacaacctaaatagaggtatggtacttggtagtttagctgccacagtacgtctacaagctggtaatgcaacagaagtgcctgccaattcaactgtattatctttctgtgcttttgctgtagatgctgctaaagcttacaaagattatctagctagtgggggacaaccaatcactaattgtgttaagatgttgtgtacacacactggtactggtcaggcaataacagttacaccggaagccaatatggatcaagaatcctttggtggtgcatcgtgttgtctgtactgccgttgccacatagatcatccaaatcctaaaggattttgtgacttaaaaggtaagtatgtacaaatacctacaacttgtgctaatgaccctgtgggttttacacttaaaaacacagtctgtaccgtctgcggtatgtggaaaggttatggctgtagttgtgatcaactccgcgaacccatgcttcagtcagctgatgcacaatcgtttttaaacgggtttgcggtgtaagtgcagcccgtcttacaccgtgcggcacaggcactagtactgatgtcgtatacagggcttttgacatctacaatgataaagtagctggttttgctaaattcctaaaaactaattgttgtcgcttccaagaaaaggacgaagatgacaatttaattgattcttactttgtagttaagagacacactttctctaactaccaacatgaagaaacaatttataatttacttaaggattgtccagctgttgctaaacatgacttctttaagtttagaatagacggtgacatggtaccacatatatcacgtcaacgtcttactaaatacacaatggcagacctcgtctatgctttaaggcattttgatgaaggtaattgtgacacattaaaagaaatacttgtcacatacaattgttgtgatgatgattatttcaataaaaaggactggtatgattttgtagaaaacccagatatattacgcgtatacgccaacttaggtgaacgtgtacgccaagctttgttaaaaacagtacaattctgtgatgccatgcgaaatgctggtattgttggtgtactgacattagataatcaagatctcaatggtaactggtatgatttcggtgatttcatacaaaccacgccaggtagtggagttcctgttgtagattcttattattcattgttaatgcctatattaaccttgaccagggctttaactgcagagtcacatgttgacactgacttaacaaagccttacattaagtgggatttgttaaaatatgacttcacggaagagaggttaaaactctttgaccgttattttaaatattgggatcagacataccacccaaattgtgttaactgtttggatgacagatgcattctgcattgtgcaaactttaatgttttattctctacagtgttcccacctacaagttttggaccactagtgagaaaaatatttgttgatggtgttccatttgtagtttcaactggataccacttcagagagctaggtgttgtacataatcaggatgtaaacttacatagctctagacttagttttaaggaattacttgtgtatgctgctgaccctgctatgcacgctgcttctggtaatctattactagataaacgcactacgtgcttttcagtagctgcacttactaacaatgttgcttttcaaactgtcaaacccggtaattttaacaaagacttctatgactttgctgtgtctaagggtttctttaaggaaggaagttctgttgaattaaaacacttcttctttgctcaggatggtaatgctgctatcagcgattatgactactatcgttataatctaccaacaatgtgtgatatcagacaactactatttgtagttgaagttgttgataagtactttgattgttacgatggtggctgtattaatgctaaccaagtcatcgtcaacaacctagacaaatcagctggttttccatttaataaatggggtaaggctagactttattatgattcaatgagttatgaggatcaagatgcacttttcgcatatacaaaacgtaatgtcatccctactataactcaaatgaatcttaagtatgccattagtgcaaagaatagagctcgcaccgtagctggtgtctctatctgtagtactatgaccaatagacagtttcatcaaaaattattgaaatcaatagccgccactagaggagctactgtagtaattggaacaagcaaattctatggtggttggcacaacatgttaaaaactgtttatagtgatgtagaaaaccctcaccttatgggttgggattatcctaaatgtgatagagccatgcctaacatgcttagaattatggcctcacttgttcttgctcgcaaacatacaacgtgttgtagcttgtcacaccgtttctatagattagctaatgagtgtgctcaagtattgagtgaaatggtcatgtgtggcggttcactatatgttaaaccaggtggaacctcatcaggagatgccacaactgcttatgctaatagtgtttttaacatttgtcaagctgtcacggccaatgttaatgcacttttatctactgatggtaacaaaattgccgataagtatgtccgcaatttacaacacagactttatgagtgtctctatagaaatagagatgttgacacagactttgtgaatgagttttacgcatatttgcgtaaacatttctcaatgatgatactctctgacgatgctgttgtgtgtttcaatagcacttatgcatctcaaggtctagtggctagcataaagaactttaagtcagttctttattatcaaaacaatgtttttatgtctgaagcaaaatgttggactgagactgaccttactaaaggacctcatgaattttgctctcaacatacaatgctagttaaacagggtgatgattatgtgtaccttccttacccagatccatcaagaatcctaggggccggctgttttgtagatgatatcgtaaaaacagatggtacacttatgattgaacggttcgtgtctttagctatagatgcttacccacttactaaacatcctaatcaggagtatgctgatgtctttcatttgtacttacaatacataagaaagctacatgatgagttaacaggacacatgttagacatgtattctgttatgcttactaatgataacacttcaaggtattgggaacctgagttttatgaggctatgtacacaccgcatacagtcttacaggctgttggggcttgtgttctttgcaattcacagacttcattaagatgtggtgcttgcatacgtagaccattcttatgttgtaaatgctgttacgaccatgtcatatcaacatcacataaattagtcttgtctgttaatccgtatgtttgcaatgctccaggttgtgatgtcacagatgtgactcaactttacttaggaggtatgagctattattgtaaatcacataaaccacccattagttttccattgtgtgctaatggacaagtttttggtttatataaaaatacatgtgttggtagcgataatgttactgactttaatgcaattgcaacatgtgactggacaaatgctggtgattacattttagctaacacctgtactgaaagactcaagctttttgcagcagaaacgctcaaagctactgaggagacatttaaactgtcttatggtattgctactgtacgtgaagtgctgtctgacagagaattacatctttcatgggaagttggtaaacctagaccaccacttaaccgaaattatgtctttactggttatcgtgtaactaaaaacagtaaagtacaaataggagagtacacctttgaaaaaggtgactatggtgatgctgttgtttaccgaggtacaacaacttacaaattaaatgttggtgattattttgtgctgacatcacatacagtaatgccattaagtgcacctacactagtgccacaagagcactatgttagaattactggcttatacccaacactcaatatctcagatgagttttctagcaatgttgcaaattatcaaaaggttggtatgcaaaagtattctacactccagggaccacctggtactggtaagagtcattttgctattggcctagctctctactacccttctgctcgcatagtgtatacagcttgctctcatgccgctgttgatgcactatgtgagaaggcattaaaatatttgcctatagataaatgtagtagaattatacctgcacgtgctcgtgtagagtgttttgataaattcaaagtgaattcaacattagaacagtatgtcttttgtactgtaaatgcattgcctgagacgacagcagatatagttgtctttgatgaaatttcaatggccacaaattatgatttgagtgttgtcaatgccagattacgtgctaagcactatgtgtacattggcgaccctgctcaattacctgcaccacgcacattgctaactaagggcacactagaaccagaatatttcaattcagtgtgtagacttatgaaaactataggtccagacatgttcctcggaacttgtcggcgttgtcctgctgaaattgttgacactgtgagtgctttggtttatgataataagcttaaagcacataaagacaaatcagctcaatgctttaaaatgttttataagggtgttatcacgcatgatgtttcatctgcaattaacaggccacaaataggcgtggtaagagaattccttacacgtaaccctgcttggagaaaagctgtctttatttcaccttataattcacagaatgctgtagcctcaaagattttgggactaccaactcaaactgttgattcatcacagggctcagaatatgactatgtcatattcactcaaaccactgaaacagctcactcttgtaatgtaaacagatttaatgttgctattaccagagcaaaagtaggcatactttgcataatgtctgatagagacctttatgacaagttgcaatttacaagtcttgaaattccacgtaggaatgtggcaactttacaagctgaaaatgtaacaggactctttaaagattgtagtaaggtaatcactgggttacatcctacacaggcacctacacacctcagtgttgacactaaattcaaaactgaaggtttatgtgttgacatacctggcatacctaaggacatgacctatagaagactcatctctatgatgggttttaaaatgaattatcaagttaatggttaccctaacatgtttatcacccgcgaagaagctataagacatgtacgtgcatggattggcttcgatgtcgaggggtgtcatgctactagagaagctgttggtaccaatttacctttacagctaggtttttctacaggtgttaacctagttgctgtacctacaggttatgttgatacacctaataatacagatttttccagagttagtgctaaaccaccgcctggagatcaatttaaacacctcataccacttatgtacaaaggacttccttggaatgtagtgcgtataaagattgtacaaatgttaagtgacacacttaaaaatctctctgacagagtcgtatttgtcttatgggcacatggctttgagttgacatctatgaagtattttgtgaaaataggacctgagcgcacctgttgtctatgtgatagacgtgccacatgcttttccactgcttcagacacttatgcctgttggcatcattctattggatttgattacgtctataatccgtttatgattgatgttcaacaatggggttttacaggtaacctacaaagcaaccatgatctgtattgtcaagtccatggtaatgcacatgtagctagttgtgatgcaatcatgactaggtgtctagctgtccacgagtgctttgttaagcgtgttgactggactattgaatatcctataattggtgatgaactgaagattaatgcggcttgtagaaaggttcaacacatggttgttaaagctgcattattagcagacaaattcccagttcttcacgacattggtaaccctaaagctattaagtgtgtacctcaagctgatgtagaatggaagttctatgatgcacagccttgtagtgacaaagcttataaaatagaagaattattctattcttatgccacacattctgacaaattcacagatggtgtatgcctattttggaattgcaatgtcgatagatatcctgctaattccattgtttgtagatttgacactagagtgctatctaaccttaacttgcctggttgtgatggtggcagtttgtatgtaaataaacatgcattccacacaccagcttttgataaaagtgcttttgttaatttaaaacaattaccatttttctattactctgacagtccatgtgagtctcatggaaaacaagtagtgtcagatatagattatgtaccactaaagtctgctacgtgtataacacgttgcaatttaggtggtgctgtctgtagacatcatgctaatgagtacagattgtatctcgatgcttataacatgatgatctcagctggctttagcttgtgggtttacaaacaatttgatacttataacctctggaacacttttacaagacttcagagtttagaaaatgtggcttttaatgttgtaaataagggacactttgatggacaacagggtgaagtaccagtttctatcattaataacactgtttacacaaaagttgatggtgttgatgtagaattgtttgaaaataaaacaacattacctgttaatgtagcatttgagctttgggctaagcgcaacattaaaccagtaccagaggtgaaaatactcaataatttgggtgtggacattgctgctaatactgtgatctgggactacaaaagagatgctccagcacatatatctactattggtgtttgttctatgactgacatagccaagaaaccaactgaaacgatttgtgcaccactcactgtcttttttgatggtagagttgatggtcaagtagacttatttagaaatgcccgtaatggtgttcttattacagaaggtagtgttaaaggtttacaaccatctgtaggtcccaaacaagctagtcttaatggagtcacattaattggagaagccgtaaaaacacagttcaattattataagaaagttgatggtgttgtccaacaattacctgaaacttactttactcagagtagaaatttacaagaatttaaacccaggagtcaaatggaaattgatttcttagaattagctatggatgaattcattgaacggtataaattagaaggctatgccttcgaacatatcgtttatggagattttagtcatagtcagttaggtggtttacatctactgattggactagctaaacgttttaaggaatcaccttttgaattagaagattttattcctatggacagtacagttaaaaactatttcataacagatgcgcaaacaggttcatctaagtgtgtgtgttctgttattgatttattacttgatgattttgttgaaataataaaatcccaagatttatctgtagtttctaaggttgtcaaagtgactattgactatacagaaatttcatttatgctttggtgtaaagatggccatgtagaaacattttacccaaaattacaatctagtcaagcgtggcaaccgggtgttgctatgcctaatctttacaaaatgcaaagaatgctattagaaaagtgtgaccttcaaaattatggtgatagtgcaacattacctaaaggcataatgatgaatgtcgcaaaatatactcaactgtgtcaatatttaaacacattaacattagctgtaccctataatatgagagttatacattttggtgctggttctgataaaggagttgcaccaggtacagctgttttaagacagtggttgcctacgggtacgctgcttgtcgattcagatcttaatgactttgtctctgatgcagattcaactttgattggtgattgtgcaactgtacatacagctaataaatgggatctcattattagtgatatgtacgaccctaagactaaaaatgttacaaaagaaaatgactctaaagagggttttttcacttacatttgtgggtttatacaacaaaagctagctcttggaggttccgtggctataaagataacagaacattcttggaatgctgatctttataagctcatgggacacttcgcatggtggacagcctttgttactaatgtgaatgcgtcatcatctgaagcatttttaattggatgtaattatcttggcaaaccacgcgaacaaatagatggttatgtcatgcatgcaaattacatattttggaggaatacaaatccaattcagttgtcttcctattctttatttgacatgagtaaatttccccttaaattaaggggtactgctgttatgtctttaaaagaaggtcaaatcaatgatatgattttatctcttcttagtaaaggtagacttataattagagaaaacaacagagttgttatttctagtgatgttcttgttaacaactaaacgaacaatggaagatgccaaaaacattaagaagggcccagcgccattctacccactcgaagacgggaccgccggcgagcagctgcacaaagccatgaagcgctacgccctggtgcccggcaccatcgcctttaccgacgcacatatcgaggtggacattacctacgccgagtacttcgagatgagcgttcggctggcagaagctatgaagcgctatgggctgaatacaaaccatcggatcgtggtgtgcagcgagaatagcttgcagttcttcatgcccgtgttgggtgccctgttcatcggtgtggctgtggccccagctaacgacatctacaacgagcgcgagctgctgaacagcatgggcatcagccagcccaccgtcgtattcgtgagcaagaaagggctgcaaaagatcctcaacgtgcaaaagaagctaccgatcatacaaaagatcatcatcatggatagcaagaccgactaccagggcttccaaagcatgtacaccttcgtgacttcccatttgccacccggcttcaacgagtacgacttcgtgcccgagagcttcgaccgggacaaaaccatcgccctgatcatgaacagtagtggcagtaccggattgcccaagggcgtagccctaccgcaccgcaccgcttgtgtccgattcagtcatgcccgcgaccccatcttcggcaaccagatcatccccgacaccgctatcctcagcgtggtgccatttcaccacggcttcggcatgttcaccacgctgggctacttgatctgcggctttcgggtcgtgctcatgtaccgcttcgaggaggagctattcttgcgcagcttgcaagactataagattcaatctgccctgctggtgcccacactatttagcttcttcgctaagagcactctcatcgacaagtacgacctaagcaacttgcacgagatcgccagcggcggggcgccgctcagcaaggaggtaggtgaggccgtggccaaacgcttccacctaccaggcatccgccagggctacggcctgacagaaacaaccagcgccattctgatcacccccgaaggggacgacaagcctggcgcagtaggcaaggtggtgcccttcttcgaggctaaggtggtggacttggacaccggtaagacactgggtgtgaaccagcgcggcgagctgtgcgtccgtggccccatgatcatgagcggctacgttaacaaccccgaggctacaaacgctctcatcgacaaggacggctggctgcacagcggcgacatcgcctactgggacgaggacgagcacttcttcatcgtggaccggctgaagagcctgatcaaatacaagggctaccaggtagccccagccgaactggagagcatcctgctgcaacaccccaacatcttcgacgccggggtcgccggcctgcccgacgacgatgccggcgagctgcccgccgcagtcgtcgtgctggaacacggtaaaaccatgaccgagaaggagatcgtggactatgtggccagccaggttacaaccgccaagaagctgcgcggtggtgttgtgttcgtggacgaggtgcctaaaggactgaccggcaagttggacgcccgcaagatccgcgagattctcattaaggccaagaagggcggcaagatcgccgtgcagtcgacggtaccgcgggcccgggatccaccggtcgccaccatggtgagcaagggcgaggagctgttcaccggggtggtgcccatcctggtcgagctggacggcgacgtaaacggccacaagttcagcgtgtccggcgagggcgagggcgatgccacctacggcaagctgaccctgaagttcatctgcaccaccggcaagctgcccgtgccctggcccaccctcgtgaccaccctgacctacggcgtgcagtgcttcagccgctaccccgaccacatgaagcagcacgacttcttcaagtccgccatgcccgaaggctacgtccaggagcgcaccatcttcttcaaggacgacggcaactacaagacccgcgccgaggtgaagttcgagggcgacaccctggtgaaccgcatcgagctgaagggcatcgacttcaaggaggacggcaacatcctggggcacaagctggagtacaactacaacagccacaacgtctatatcatggccgacaagcagaagaacggcatcaaggtgaacttcaagatccgccacaacatcgaggacggcagcgtgcagctcgccgaccactaccagcagaacacccccatcggcgacggccccgtgctgctgcccgacaaccactacctgagcacccagtccgccctgagcaaagaccccaacgagaagcgcgatcacatggtcctgctggagttcgtgaccgccgccgggatcactctcggcatggacgagctgtacaagtaaacgaacttatggatttgtttatgagaatcttcacaattggaactgtaactttgaagcaaggtgaaatcaaggatgctactccttcagattttgttcgcgctactgcaacgataccgatacaagcctcactccctttcggatggcttattgttggcgttgcacttcttgctgtttttcagagcgcttccaaaatcataaccctcaaaaagagatggcaactagcactctccaagggtgttcactttgtttgcaacttgctgttgttgtttgtaacagtttactcacaccttttgctcgttgctgctggccttgaagccccttttctctatctttatgctttagtctacttcttgcagagtataaactttgtaagaataataatgaggctttggctttgctggaaatgccgttccaaaaacccattactttatgatgccaactattttctttgctggcatactaattgttacgactattgtataccttacaatagtgtaacttcttcaattgtcattacttcaggtgatggcacaacaagtcctatttctgaacatgactaccagattggtggttatactgaaaaatgggaatctggagtaaaagactgtgttgtattacacagttacttcacttcagactattaccagctgtactcaactcaattgagtacagacactggtgttgaacatgttaccttcttcatctacaataaaattgttgatgagcctgaagaacatgtccaaattcacacaatcgacggttcatccggagttgttaatccagtaatggaaccaatttatgatgaaccgacgacgactactagcgtgcctttgtaagcacaagctgatgagtacgaacttatgatcgagcaggatggcctgcatgccggatctccagctgcctgggttgagagactgttcggctatgattgggcccagcagaccatcggctgttctgatgccgccgtgtttagactgagtgcccagggtagacccgtgctgttcgtgaaaaccgatctgtctggcgccctgaacgagctgcaggatgaagccgctagactgagctggctggctacaacaggcgtgccatgtgctgccgtgctggatgtggttacagaggccggaagagactggctgctgctgggagaagttccaggccaggatctgctgagcagtcatctggcccctgccgagaaggtgtccattatggccgatgccatgcggcggctgcacacacttgatcctgccacctgtcctttcgaccaccaagccaagcaccggatcgagagggccagaaccagaatggaagccggcctggtggaccaggacgacctggatgaagaacaccaaggactggccccagctgagctgttcgccagactgaaagccagaatgcccgacggcgaggatctggtggttacacatggggatgcctgcctgcctaacatcatggtggaaaacggccggttcagcggctttatcgactgtggcagactgggcgtcgccgacagatatcaggatatcgccctggccaccagagatatcgccgaagaacttggcggagagtgggccgatagattcctggtgctgtacggaatcgccgctcctgactctcagcggatcgccttctacagactgctggacgagttcttctgagtgacaacagatgtttcatctcgttgactttcaggttactatagcagagatattactaattattatgaggacttttaaagtttccatttggaatcttgattacatcataaacctcataattaaaaatttatctaagtcactaactgagaataaatattctcaattagatgaagagcaaccaatggagattgattaaacgaacatgaaaattattcttttcttggcactgataacactcgctacttgtgagctttatcactaccaagagtgtgttagaggtacaacagtacttttaaaagaaccttgctcttctggaacatacgagggcaattcaccatttcatcctctagctgataacaaatttgcactgacttgctttagcactcaatttgcttttgcttgtcctgacggcgtaaaacacgtctatcagttacgtgccagatcagtttcacctaaactgttcatcagacaagaggaagttcaagaactttactctccaatttttcttattgttgcggcaatagtgtttataacactttgcttcacactcaaaagaaagacagaatgattgaactttcattaattgacttctatttgtgctttttagcctttctgctattccttgttttaattatgcttattatcttttggttctcacttgaactgcaagatcataatgaaacttgtcacgcctaaacgaacatgaaatttcttgttttcttaggaatcatcacaactgtagctgcatttcaccaagaatgtagtttacagtcatgtactcaacatcaaccatatgtagttgatgacccgtgtcctattcacttctattctaaatggtatattagagtaggagctagaaaatcagcacctttaattgaattgtgcgtggatgaggctggttctaaatcacccattcagtacatcgatatcggtaattatacagtttcctgtttaccttttacaattaattgccaggaacctaaattgggtagtcttgtagtgcgttgttcgttctatgaagactttttagagtatcatgacgttcgtgttgttttagatttcatctaaacgaacaaactaaaatgtctgataatggaccccaaaatcagcgaaatgcaccccgcattacgtttggtggaccctcagattcaactggcagtaaccagaatggagaacgcagtggggcgcgatcaaaacaacgtcggccccaaggtttacccaataatactgcgtcttggttcaccgctctcactcaacatggcaaggaagaccttaaattccctcgaggacaaggcgttccaattaacaccaatagcagtccagatgaccaaattggctactaccgaagagctaccagacgaattcgtggtggtgacggtaaaatgaaagatctcagtccaagatggtatttctactacctaggaactgggccagaagctggacttccctatggtgctaacaaagacggcatcatatgggttgcaactgagggagccttgaatacaccaaaagatcacattggcacccgcaatcctgctaacaatgctgcaatcgtgctacaacttcctcaaggaacaacattgccaaaaggcttctacgcagaagggagcagaggcggcagtcaagcctcttctcgttcctcatcacgtagtcgcaacagttcaagaaattcaactccaggcagcagtaggggaacttctcctgctagaatggctggcaatggcggtgatgctgctcttgctttgctgctgcttgacagattgaaccagcttgagagcaaaatgtctggtaaaggccaacaacaacaaggccaaactgtcactaagaaatctgctgctgaggcttctaagaagcctcggcaaaaacgtactgccactaaagcatacaatgtaacacaagctttcggcagacgtggtccagaacaaacccaaggaaattttggggaccaggaactaatcagacaaggaactgattacaaacattggccgcaaattgcacaatttgcccccagcgcttcagcgttcttcggaatgtcgcgcattggcatggaagtcacaccttcgggaacgtggttgacctacacaggtgccatcaaattggatgacaaagatccaaatttcaaagatcaagtcattttgctgaataagcatattgacgcatacaaaacattcccaccaacagagcctaaaaaggacaaaaagaagaaggctgatgaaactcaagccttaccgcagagacagaagaaacagcaaactgtgactcttcttcctgctgcagatttggatgatttctccaaacaattgcaacaatccatgagcagtgctgactcaactcaggcctaaactcatgcagaccacacaaggcagatgggctatataaacgttttcgcttttccgtttacgatatatagtctactcttgtgcagaatgaattctcgtaactacatagcacaagtagatgtagttaactttaatctcacatagcaatctttaatcagtgtgtaacattagggaggacttgaaagagccaccacattttcaccgaggccacgcggagtacgatcgagtgtacagtgaacaatgctagggagagctgcctatatggaagagccctaatgtgtaaaattaattttagtagtgctatccccatgtgattttaatagcttcttaggagaatgacaaaaaaaaaaaaaaaaaaaaaaaaaagggtcggcatggcatctccacctcctcgcggtccgacctgggcatccgaaggaggacgcacgtccactcggatggctaagggagagcctgcagtagcataaccccttggggcctctaaacgggtcttgaggggttttttggcggccgcttctatagtgtcacctaaatactagtgactccagcgtaactggactggccacagttaggccgcaaatgtaatcacactggctcaccttcgggtgggcctttctgcgttcgcgagtggacccgataagctcatggagcggcgtaaccgtcgcacaggaaggacagagaaagcgcggatctgggaagtgacggacagaacggtcaggacctggattggggaggcggttgccgccgctgctgctgacggtgtgacgttctctgttccggtcacaccacatacgttccgccattcctatgcgatgcacatgctgtatgccggtataccgctgaaagttctgcaaagcctgatgggacataagtccatcagttcaacggaagtctacacgaaggtttttgcgctggatgtggctgcccggcaccgggtgcagtttgcgatgccggagtctgatgcggttgcgatgctgaaacaattatcctgagaataaatgccttggcctttatatggaaatgtggaactgagtggatatgctgtttttgtctgttaaacagagaagctggctgttatccactgagaagcgaacgaaacagtcgggaaaatctcccattatcgtagagatccgcattattaatctcaggagcctgtgtagcgtttataggaagtagtgttctgtcatgatgcctgcaagcggtaacgaaaacgatttgaatatgccttcaggaacaatagaaatcttcgtgcggtgttacgttgaagtggagcggattatgtcagcaatggacagaacaacctaatgaacacagaaccatgatgtggtctgtccttttacagccagtagtgctcgccgcagtcgagcgacagggcgaagccctcggctggttgccctcgccgctgggctggcggccgtctatggccctgcaaacgcgccagaaacgccgtcgaagccgtgtgcgagacaccgcggccggccgccggcgttgtggatacctcgcggaaaacttggccctcactgacagatgaggggcggacgttgacacttgaggggccgactcacccggcgcggcgttgacagatgaggggcaggctcgatttcggccggcgacgtggagctggccagcctcgcaaatcggcgaaaacgcctgattttacgcgagtttcccacagatgatgtggacaagcctggggataagtgccctgcggtattgacacttgaggggcgcgactactgacagatgaggggcgcgatccttgacacttgaggggcagagtgctgacagatgaggggcgcacctattgacatttgaggggctgtccacaggcagaaaatccagcatttgcaagggtttccgcccgtttttcggccaccgctaacctgtcttttaacctgcttttaaaccaatatttataaaccttgtttttaaccagggctgcgccctgtgcgcgtgaccgcgcacgccgaaggggggtgcccccccttctcgaaccctcccggtcgagtgagcgaggaagcaccagggaacagcacttatatattctgcttacacacgatgcctgaaaaaacttcccttggggttatccacttatccacggggatatttttataattattttttttatagtttttagatcttcttttttagagcgccttgtaggcctttatccatgctggttctagagaaggtgttgtgacaaattgccctttcagtgtgacaaatcaccctcaaatgacagtcctgtctgtgacaaattgcccttaaccctgtgacaaattgccctcagaagaagctgttttttcacaaagttatccctgcttattgactcttttttatttagtgtgacaatctaaaaacttgtcacacttcacatggatctgtcatggcggaaacagcggttatcaatcacaagaaacgtaaaaatagcccgcgaatcgtccagtcaaacgacctcactgaggcggcatatagtctctcccgggatcaaaaacgtatgctgtatctgttcgttgaccagatcagaaaatctgatggcaccctacaggaacatgacggtatctgcgagatccatgttgctaaatatgctgaaatattcggattgacctctgcggaagccagtaaggatatacggcaggcattgaagagtttcgcggggaaggaagtggttttttatcgccctgaagaggatgccggcgatgaaaaaggctatgaatcttttccttggtttatcaaacgtgcgcacagtccatccagagggctttacagtgtacatatcaacccatatctcattcccttctttatcgggttacagaaccggtttacgcagtttcggcttagtgaaacaaaagaaatcaccaatccgtatgccatgcgtttatacgaatccctgtgtcagtatcgtaagccggatggctcaggcatcgtctctctgaaaatcgactggatcatagagcgttaccagctgcctcaaagttaccagcgtatgcctgacttccgccgccgcttcctgcaggtctgtgttaatgagatcaacagcagaactccaatgcgcctctcatacattgagaaaaagaaaggccgccagacgactcatatcgtattttccttccgcgatatcacttccatgacgacaggatagtctgagggttatctgtcacagatttgagggtggttcgtcacatttgttctgacctactgagggtaatttgtcacagttttgctgtttccttcagcctgcatggattttctcatactttttgaactgtaatttttaaggaagccaaatttgagggcagtttgtcacagttgatttccttctctttcccttcgtcatgtgacctgatatcgggggttagttcgtcatcattgatgagggttgattatcacagtttattactctgaattggctatccgcgtgtgtacctctacctggagtttttcccacggtggatatttcttcttgcgctgagcgtaagagctatctgacagaacagttcttctttgcttcctcgccagttcgctcgctatgctcggttacacggctgcggcgagcgctagtgataataagtgactgaggtatgtgctcttcttatctccttttgtagtgttgctcttattttaaacaactttgcggttttttgatgactttgcgattttgttgttgctttgcagtaaattgcaagatttaataaaaaaacgcaaagcaatgattaaaggatgttcagaatgaaactcatggaaacacttaaccagtgcataaacgctggtcatgaaatgacgaaggctatcgccattgcacagtttaatgatgacagcccggaagcgaggaaaataacccggcgctggagaataggtgaagcagcggatttagttggggtttcttctcaggctatcagagatgccgagaaagcagggcgactaccgcacccggatatggaaattcgaggacgggttgagcaacgtgttggttatacaattgaacaaattaatcatatgcgtgatgtgtttggtacgcgattgcgacgtgctgaagacgtatttccaccggtgatcggggttgctgcccataaaggaggcgtttacaaaacctcagtttctgttcatcttgctcaggatctggctctgaaggggctacgtgttttgctcgtggaaggtaacgacccccagggaacagcctcaatgtatcacggatgggtaccagatcttcatattcatgcagaagacactctcctgcctttctatcttggggaaaaggacgatgtcacttatgcaataaagcccacttgctggccggggcttgacattattccttcctgtctggctctgcaccgtattgaaactgagttaatgggcaaatttgatgaaggtaaactgcccaccgatccacacctgatgctccgactggccattgaaactgttgctcatgactatgatgtcatagttattgacagcgcgcctaacctgggtatcggcacgattaatgtcgtatgtgctgctgatgtgctgattgttcccacgcctgctgagttgtttgactacacctccgcactgcagtttttcgatatgcttcgtgatctgctcaagaacgttgatcttaaagggttcgagcctgatgtacgtattttgcttaccaaatacagcaatagtaatggctctcagtccccgtggatggaggagcaaattcgggatgcctggggaagcatggttctaaaaaatgttgtacgtgaaacggatgaagttggtaaaggtcagatccggatgagaactgtttttgaacaggccattgatcaacgctcttcaactggtgcctggagaaatgctctttctatttgggaacctgtctgcaatgaaattttcgatcgtctgattaaaccacgctgggagattagataatgaagcgtgcgcctgttattccaaaacatacgctcaatactcaaccggttgaagatacttcgttatcgacaccagctgccccgatggtggattcgttaattgcgcgcgtaggagtaatggctcgcggtaatgccattactttgcctgtatgtggtcgggatgtgaagtttactcttgaagtgctccggggtgatagtgttgagaagacctctcgggtatggtcaggtaatgaacgtgaccaggagctgcttactgaggacgcactggatgatctcatcccttcttttctactgactggtcaacagacaccggcgttcggtcgaagagtatctggtgtcatagaaattgccgatgggagtcgccgtcgtaaagctgctgcacttaccgaaagtgattatcgtgttctggttggcgagctggatgatgagcagatggctgcattatccagattgggtaacgattatcgcccaacaagtgcttatgaacgtggtcagcgttatgcaagccgattgcagaatgaatttgctggaaatatttctgcgctggctgatgcggaaaatatttcacgtaagattattacccgctgtatcaacaccgccaaattgcctaaatcagttgttgctcttttttctcaccccggtgaactatctgcccggtcaggtgatgcacttcaaaaagcctttacagataaagaggaattacttaagcagcaggcatctaaccttcatgagcagaaaaaagctggggtgatatttgaagctgaagaagttatcactcttttaacttctgtgcttaaaacgtcatctgcatcaagaactagtttaagctcacgacatcagtttgctcctggagcgacagtattgtataagggcgataaaatggtgcttaacctggacaggtctcgtgttccaactgagtgtatagagaaaattgaggccattcttaaggaacttgaaaagccagcaccctgatgcgaccacgttttagtctacgtttatctgtctttacttaatgtcctttgttacaggccagaaagcataactggcctgaatattctctctgggcccactgttccacttgtatcgtcggtctgataatcagactgggaccacggtcccactcgtatcgtcggtctgattattagtctgggaccacggtcccactcgtatcgtcggtctgattattagtctgggaccacggtcccactcgtatcgtcggtctgataatcagactgggaccacggtcccactcgtatcgtcggtctgattattagtctgggaccatggtcccactcgtatcgtcggtctgattattagtctgggaccacggtcccactcgtatcgtcggtctgattattagtctggaaccacggtcccactcgtatcgtcggtctgattattagtctgggaccacggtcccactcgtatcgtcggtctgattattagtctgggaccacgatcccactcgtgttgtcggtctgattatcggtctgggaccacggtcccacttgtattgtcgatcagactatcagcgtgagactacgattccatcaatgcctgtcaagggcaagtattgacatggtcgtcgtaacctgtagaacggagtaacctcggtgtgcggttgtatgcctgctgtggattgctgctgtgtcctgcttatccacaacattttgcgcacggttatgtggacaaaatacctggttacccaggccgtgccggcacgttaaccgggctgcatccgatgcaagtgtgtcgctgtcgacgagctcgcgagctcggacatgaggttgccccgtattcagtgtcgctgatttgtattgtctgaagttgcttttacgttaagttgatgcagatcaattaatacgatacctgcgtcataattgattatttgacgtggtttgatggcctccacgcacgttgtgatatgtagatgataatcattatcactttacgggtcctttccggtgatccgacaggttacggggcggcgacctcgcgggttttcgctatttatgaaaattttccggtttaaggcgtttccgttcttcttcgtcataacttaatgtttttatttaaaataccctctgaaaagaaaggaaacgacaggtgctgaaagcgagctttttggcctctgtcgtttcctttctctgtttttgtccgtggaatgaacaatggaagtccgagctcatcgctaataacttcgtatagcatacattatacgaagttatattcgatgcggccgatctagcagaaagtcaaaagcctccgaccggaggcttttgacttctgtcacctaggttacgccccgccctgccactcatcgcagtactgttgtaattcattaagcattctgccgacatggaagccatcacaaacggcatgatgaacctgaatcgccagcggcatcagcaccttgtcgccttgcgtataatatttgcccatggtgaaaacgggggcgaagaagttgtccatattggccacgtttaaatcaaaactggtgaaactcacccagggattggctgagacgaaaaacatattctcaataaaccctttagggaaataggccaggttttcaccgtaacacgccacatcttgcgaatatatgtgtagaaactgccggaaatcgtcgtggtattcactccagagcgatgaaaacgtttcagtttgctcatggaaaacggtgtaacaagggtgaacactatcccatatcaccagctcaccgtctttcattgccatacgaaattccggatgagcattcatcaggcgggcaagaatgtgaataaaggccggataaaacttgtgcttatttttctttacggtctttaaaaaggccgtaatatccagctgaacggtctggttataggtacattgagcaactgactgaaatgcctcaaaatgttctttacgatgccattgggatatatcaacggtggtatatccagtgatttttttctccattttagcttccttagctcctgaaaatctcgataactcaaaaaatacgcccggtagtgatcttatttcattatggtgaaagttggaacctcttacgtgccgatcagattaaaacgaaaggcccagtctttcgactgagcctttcgttttatttgaccatgttggtatgatttaaattcagt

SEQ ID NO: 5 - DNA, 26596 bp, Artificial Sequence
  T7-scv2-nanoluc replicon
taatacgactcactatagattaaaggtttataccttcccaggtaacaaaccaaccaactttcgatctcttgtagatctgttctctaaacgaactttaaaatctgtgtggctgtcactcggctgcatgcttagtgcactcacgcagtataattaataactaattactgtcgttgacaggacacgagtaactcgtctatcttctgcaggctgcttacggtttcgtccgtgttgcagccgatcatcagcacatctaggtttcgtccgggtgtgaccgaaaggtaagatggagagccttgtccctggtttcaacgagaaaacacacgtccaactcagtttgcctgttttacaggttcgcgacgtgctcgtacgtggctttggagactccgtggaggaggtcttatcagaggcacgtcaacatcttaaagatggcacttgtggcttagtagaagttgaaaaaggcgttttgcctcaacttgaacagccctatgtgttcatcaaacgttcggatgctcgaactgcacctcatggtcatgttatggttgagctggtagcagaactcgaaggcattcagtacggtcgtagtggtgagacacttggtgtccttgtccctcatgtgggcgaaataccagtggcttaccgcaaggttcttcttcgtaagaacggtaataaaggagctggtggccatagttacggcgccgatctaaagtcatttgacttaggcgacgagcttggcactgatccttatgaagattttcaagaaaactggaacactaaacatagcagtggtgttacccgtgaactcatgcgtgagcttaacggaggggcatacactcgctatgtcgataacaacttctgtggccctgatggctaccctcttgagtgcattaaagaccttctagcacgtgctggtaaagcttcatgcactttgtccgaacaactggactttattgacactaagaggggtgtatactgctgccgtgaacatgagcatgaaattgcttggtacacggaacgttctgaaaagagctatgaattgcagacaccttttgaaattaaattggcaaagaaatttgacaccttcaatggggaatgtccaaattttgtatttcccttaaattccataatcaagactattcaaccaagggttgaaaagaaaaagcttgatggctttatgggtagaattcgatctgtctatccagttgcgtcaccaaatgaatgcaaccaaatgtgcctttcaactctcatgaagtgtgatcattgtggtgaaacttcatggcagacgggcgattttgttaaagccacttgcgaattttgtggcactgagaatttgactaaagaaggtgccactacttgtggttacttaccccaaaatgctgttgttaaaatttattgtccagcatgtcacaattcagaagtaggacctgagcatagtcttgccgaataccataatgaatctggcttgaaaaccattcttcgtaagggtggtcgcactattgcctttggaggctgtgtgttctcttatgttggttgccataacaagtgtgcctattgggttccacgtgctagcgctaacataggttgtaaccatacaggtgttgttggagaaggttccgaaggtcttaatgacaaccttcttgaaatactccaaaaagagaaagtcaacatcaatattgttggtgactttaaacttaatgaagagatcgccattattttggcatctttttctgcttccacaagtgcttttgtggaaactgtgaaaggtttggattataaagcattcaaacaaattgttgaatcctgtggtaattttaaagttacaaaaggaaaagctaaaaaaggtgcctggaatattggtgaacagaaatcaatactgagtcctctttatgcatttgcatcagaggctgctcgtgttgtacgatcaattttctcccgcactcttgaaactgctcaaaattctgtgcgtgttttacagaaggccgctataacaatactagatggaatttcacagtattcactgagactcattgatgctatgatgttcacatctgatttggctactaacaatctagttgtaatggcctacattacaggtggtgttgttcagttgacttcgcagtggctaactaacatctttggcactgtttatgaaaaactcaaacccgtccttgattggcttgaagagaagtttaaggaaggtgtagagtttcttagagacggttgggaaattgttaaatttatctcaacctgtgcttgtgaaattgtcggtggacaaattgtcacctgtgcaaaggaaattaaggagagtgttcagacattctttaagcttgtaaataaatttttggctttgtgtgctgactctatcattattggtggagctaaacttaaagccttgaatttaggtgaaacatttgtcacgcactcaaagggattgtacagaaagtgtgttaaatccagagaagaaactggcctactcatgcctctaaaagccccaaaagaaattatcttcttagagggagaaacacttcccacagaagtgttaacagaggaagttgtcttgaaaactggtgatttacaaccattagaacaacctactagtgaagctgttgaagctccattggttggtacaccagtttgtattaacgggcttatgttgctcgaaatcaaagacacagaaaagtactgtgcccttgcacctaatatgatggtaacaaacaataccttcacactcaaaggcggtgcaccaacaaaggttacttttggtgatgacactgtgatagaagtgcaaggttacaagagtgtgaatatcacttttgaacttgatgaaaggattgataaagtacttaatgagaagtgctctgcctatacagttgaactcggtacagaagtaaatgagttcgcctgtgttgtggcagatgctgtcataaaaactttgcaaccagtatctgaattacttacaccactgggcattgatttagatgagtggagtatggctacatactacttatttgatgagtctggtgagtttaaattggcttcacatatgtattgttctttctaccctccagatgaggatgaagaagaaggtgattgtgaagaagaagagtttgagccatcaactcaatatgagtatggtactgaagatgattaccaaggtaaacctttggaatttggtgccacttctgctgctcttcaacctgaagaagagcaagaagaagattggttagatgatgatagtcaacaaactgttggtcaacaagacggcagtgaggacaatcagacaactactattcaaacaattgttgaggttcaacctcaattagagatggaacttacaccagttgttcagactattgaagtgaatagttttagtggttatttaaaacttactgacaatgtatacattaaaaatgcagacattgtggaagaagctaaaaaggtaaaaccaacagtggttgttaatgcagccaatgtttaccttaaacatggaggaggtgttgcaggagccttaaataaggctactaacaatgccatgcaagttgaatctgatgattacatagctactaatggaccacttaaagtgggtggtagttgtgttttaagcggacacaatcttgctaaacactgtcttcatgttgtcggcccaaatgttaacaaaggtgaagacattcaacttcttaagagtgcttatgaaaattttaatcagcacgaagttctacttgcaccattattatcagctggtatttttggtgctgaccctatacattctttaagagtttgtgtagatactgttcgcacaaatgtctacttagctgtctttgataaaaatctctatgacaaacttgtttcaagctttttggaaatgaagagtgaaaagcaagttgaacaaaagatcgctgagattcctaaagaggaagttaagccatttataactgaaagtaaaccttcagttgaacagagaaaacaagatgataagaaaatcaaagcttgtgttgaagaagttacaacaactctggaagaaactaagttcctcacagaaaacttgttactttatattgacattaatggcaatcttcatccagattctgccactcttgttagtgacattgacatcactttcttaaagaaagatgctccatatatagtgggtgatgttgttcaagagggtgttttaactgctgtggttatacctactaaaaaggctggtggcactactgaaatgctagcgaaagctttgagaaaagtgccaacagacaattatataaccacttacccgggtcagggtttaaatggttacactgtagaggaggcaaagacagtgcttaaaaagtgtaaaagtgccttttacattctaccatctattatctctaatgagaagcaagaaattcttggaactgtttcttggaatttgcgagaaatgcttgcacatgcagaagaaacacgcaaattaatgcctgtctgtgtggaaactaaagccatagtttcaactatacagcgtaaatataagggtattaaaatacaagagggtgtggttgattatggtgctagattttacttttacaccagtaaaacaactgtagcgtcacttatcaacacacttaacgatctaaatgaaactcttgttacaatgccacttggctatgtaacacatggcttaaatttggaagaagctgctcggtatatgagatctctcaaagtgccagctacagtttctgtttcttcacctgatgctgttacagcgtataatggttatcttacttcttcttctaaaacacctgaagaacattttattgaaaccatctcacttgctggttcctataaagattggtcctattctggacaatctacacaactaggtatagaatttcttaagagaggtgataaaagtgtatattacactagtaatcctaccacattccacctagatggtgaagttatcacctttgacaatcttaagacacttctttctttgagagaagtgaggactattaaggtgtttacaacagtagacaacattaacctccacacgcaagttgtggacatgtcaatgacatatggacaacagtttggtccaacttatttggatggagctgatgttactaaaataaaacctcataattcacatgaaggtaaaacattttatgttttacctaatgatgacactctacgtgttgaggcttttgagtactaccacacaactgatcctagttttctgggtaggtacatgtcagcattaaatcacactaaaaagtggaaatacccacaagttaatggtttaacttctattaaatgggcagataacaactgttatcttgccactgcattgttaacactccaacaaatagagttgaagtttaatccacctgctctacaagatgcttattacagagcaagggctggtgaagctgctaacttttgtgcacttatcttagcctactgtaataagacagtaggtgagttaggtgatgttagagaaacaatgagttacttgtttcaacatgccaatttagattcttgcaaaagagtcttgaacgtggtgtgtaaaacttgtggacaacagcagacaacccttaagggtgtagaagctgttatgtacatgggcacactttcttatgaacaatttaagaaaggtgttcagataccttgtacgtgtggtaaacaagctacaaaatatctagtacaacaggagtcaccttttgttatgatgtcagcaccacctgctcagtatgaacttaagcatggtacatttacttgtgctagtgagtacactggtaattaccagtgtggtcactataaacatataacttctaaagaaactttgtattgcatagacggtgctttacttacaaagtcctcagaatacaaaggtcctattacggatgttttctacaaagaaaacagttacacaacaaccataaaaccagttacttataaattggatggtgttgtttgtacagaaattgaccctaagttggacaattattataagaaagacaattcttatttcacagagcaaccaattgatcttgtaccaaaccaaccatatccaaacgcaagcttcgataattttaagtttgtatgtgataatatcaaatttgctgatgatttaaaccagttaactggttataagaaacctgcttcaagagagcttaaagttacatttttccctgacttaaatggtgatgtggtggctattgattataaacactacacaccctcttttaagaaaggagctaaattgttacataaacctattgtttggcatgttaacaatgcaactaataaagccacgtataaaccaaatacctggtgtatacgttgtctttggagcacaaaaccagttgaaacatcaaattcgtttgatgtactgaagtcagaggacgcgcagggaatggataatcttgcctgcgaagatctaaaaccagtctctgaagaagtagtggaaaatcctaccatacagaaagacgttcttgagtgtaatgtgaaaactaccgaagttgtaggagacattatacttaaaccagcaaataatagtttaaaaattacagaagaggttggccacacagatctaatggctgcttatgtagacaattctagtcttactattaagaaacctaatgaattatctagagtattaggtttgaaaacccttgctactcatggtttagctgctgttaatagtgtcccttgggatactatagctaattatgctaagccttttcttaacaaagttgttagtacaactactaacatagttacacggtgtttaaaccgtgtttgtactaattatatgccttatttctttactttattgctacaattgtgtacttttactagaagtacaaattctagaattaaagcatctatgccgactactatagcaaagaatactgttaagagtgtcggtaaattttgtctagaggcttcatttaattatttgaagtcacctaatttttctaaactgataaatattataatttggtttttactattaagtgtttgcctaggttctttaatctactcaaccgctgctttaggtgttttaatgtctaatttaggcatgccttcttactgtactggttacagagaaggctatttgaactctactaatgtcactattgcaacctactgtactggttctataccttgtagtgtttgtcttagtggtttagattctttagacacctatccttctttagaaactatacaaattaccatttcatcttttaaatgggatttaactgcttttggcttagttgcagagtggtttttggcatatattcttttcactaggtttttctatgtacttggattggctgcaatcatgcaattgtttttcagctattttgcagtacattttattagtaattcttggcttatgtggttaataattaatcttgtacaaatggccccgatttcagctatggttagaatgtacatcttctttgcatcattttattatgtatggaaaagttatgtgcatgttgtagacggttgtaattcatcaacttgtatgatgtgttacaaacgtaatagagcaacaagagtcgaatgtacaactattgttaatggtgttagaaggtccttttatgtctatgctaatggaggtaaaggcttttgcaaactacacaattggaattgtgttaattgtgatacattctgtgctggtagtacatttattagtgatgaagttgcgagagacttgtcactacagtttaaaagaccaataaatcctactgaccagtcttcttacatcgttgatagtgttacagtgaagaatggttccatccatctttactttgataaagctggtcaaaagacttatgaaagacattctctctctcattttgttaacttagacaacctgagagctaataacactaaaggttcattgcctattaatgttatagtttttgatggtaaatcaaaatgtgaagaatcatctgcaaaatcagcgtctgtttactacagtcagcttatgtgtcaacctatactgttactagatcaggcattagtgtctgatgttggtgatagtgcggaagttgcagttaaaatgtttgatgcttacgttaatacgttttcatcaacttttaacgtaccaatggaaaaactcaaaacactagttgcaactgcagaagctgaacttgcaaagaatgtgtccttagacaatgtcttatctacttttatttcagcagctcggcaagggtttgttgattcagatgtagaaactaaagatgttgttgaatgtcttaaattgtcacatcaatctgacatagaagttactggcgatagttgtaataactatatgctcacctataacaaagttgaaaacatgacaccccgtgaccttggtgcttgtattgactgtagtgcgcgtcatattaatgcgcaggtagcaaaaagtcacaacattgctttgatatggaacgttaaagatttcatgtcattgtctgaacaactacgaaaacaaatacgtagtgctgctaaaaagaataacttaccttttaagttgacatgtgcaactactagacaagttgttaatgttgtaacaacaaagatagcacttaagggtggtaaaattgttaataattggttgaagcagttaattaaagttacacttgtgttcctttttgttgctgctattttctatttaataacacctgttcatgtcatgtctaaacatactgacttttcaagtgaaatcataggatacaaggctattgatggtggtgtcactcgtgacatagcatctacagatacttgttttgctaacaaacatgctgattttgacacatggtttagccagcgtggtggtagttatactaatgacaaagcttgcccattgattgctgcagtcataacaagagaagtgggttttgtcgtgcctggtttgcctggcacgatattacgcacaactaatggtgactttttgcatttcttacctagagtttttagtgcagttggtaacatctgttacacaccatcaaaacttatagagtacactgactttgcaacatcagcttgtgttttggctgctgaatgtacaatttttaaagatgcttctggtaagccagtaccatattgttatgataccaatgtactagaaggttctgttgcttatgaaagtttacgccctgacacacgttatgtgctcatggatggctctattattcaatttcctaacacctaccttgaaggttctgttagagtggtaacaacttttgattctgagtactgtaggcacggcacttgtgaaagatcagaagctggtgtttgtgtatctactagtggtagatgggtacttaacaatgattattacagatctttaccaggagttttctgtggtgtagatgctgtaaatttacttactaatatgtttacaccactaattcaacctattggtgctttggacatatcagcatctatagtagctggtggtattgtagctatcgtagtaacatgccttgcctactattttatgaggtttagaagagcttttggtgaatacagtcatgtagttgcctttaatactttactattccttatgtcattcactgtactctgtttaacaccagtttactcattcttacctggtgtttattctgttatttacttgtacttgacattttatcttactaatgatgtttcttttttagcacatattcagtggatggttatgttcacacctttagtacctttctggataacaattgcttatatcatttgtatttccacaaagcatttctattggttctttagtaattacctaaagagacgtgtagtctttaatggtgtttcctttagtacttttgaagaagctgcgctgtgcacctttttgttaaataaagaaatgtatctaaagttgcgtagtgatgtgctattacctcttacgcaatataatagatacttagctctttataataagtacaagtattttagtggagcaatggatacaactagctacagagaagctgcttgttgtcatctcgcaaaggctctcaatgacttcagtaactcaggttctgatgttctttaccaaccaccacaaacctctatcacctcagctgttttgcagagtggttttagaaaaatggcattcccatctggtaaagttgagggttgtatggtacaagtaacttgtggtacaactacacttaacggtctttggcttgatgacgtagtttactgtccaagacatgtgatctgcacctctgaagacatgcttaaccctaattatgaagatttactcattcgtaagtctaatcataatttcttggtacaggctggtaatgttcaactcagggttattggacattctatgcaaaattgtgtacttaagcttaaggttgatacagccaatcctaagacacctaagtataagtttgttcgcattcaaccaggacagactttttcagtgttagcttgttacaatggttcaccatctggtgtttaccaatgtgctatgaggcccaatttcactattaagggttcattccttaatggttcatgtggtagtgttggttttaacatagattatgactgtgtctctttttgttacatgcaccatatggaattaccaactggagttcatgctggcacagacttagaaggtaacttttatggaccttttgttgacaggcaaacagcacaagcagctggtacggacacaactattacagttaatgttttagcttggttgtacgctgctgttataaatggagacaggtggtttctcaatcgatttaccacaactcttaatgactttaaccttgtggctatgaagtacaattatgaacctctaacacaagaccatgttgacatactaggacctctttctgctcaaactggaattgccgttttagatatgtgtgcttcattaaaagaattactgcaaaatggtatgaatggacgtaccatattgggtagtgctttattagaagatgaatttacaccttttgatgttgttagacaatgctcaggtgttactttccaaagtgcagtgaaaagaacaatcaagggtacacaccactggttgttactcacaattttgacttcacttttagttttagtccagagtactcaatggtctttgttcttttttttgtatgaaaatgcctttttaccttttgctatgggtattattgctatgtctgcttttgcaatgatgtttgtcaaacataagcatgcatttctctgtttgtttttgttaccttctcttgccactgtagcttattttaatatggtctatatgcctgctagttgggtgatgcgtattatgacatggttggatatggttgatactagtttgtctggttttaagctaaaagactgtgttatgtatgcatcagctgtagtgttactaatccttatgacagcaagaactgtgtatgatgatggtgctaggagagtgtggacacttatgaatgtcttgacactcgtttataaagtttattatggtaatgctttagatcaagccatttccatgtgggctcttataatctctgttacttctaactactcaggtgtagttacaactgtcatgtttttggccagaggtattgtttttatgtgtgttgagtattgccctattttcttcataactggtaatacacttcagtgtataatgctagtttattgtttcttaggctatttttgtacttgttactttggcctcttttgtttactcaaccgctactttagactgactcttggtgtttatgattacttagtttctacacaggagtttagatatatgaattcacagggactactcccacccaagaatagcatagatgccttcaaactcaacattaaattgttgggtgttggtggcaaaccttgtatcaaagtagccactgtacagtctaaaatgtcagatgtaaagtgcacatcagtagtcttactctcagttttgcaacaactcagagtagaatcatcatctaaattgtgggctcaatgtgtccagttacacaatgacattctcttagctaaagatactactgaagcctttgaaaaaatggtttcactactttctgttttgctttccatgcagggtgctgtagacataaacaagctttgtgaagaaatgctggacaacagggcaaccttacaagctatagcctcagagtttagttcccttccatcatatgcagcttttgctactgctcaagaagcttatgagcaggctgttgctaatggtgattctgaagttgttcttaaaaagttgaagaagtctttgaatgtggctaaatctgaatttgaccgtgatgcagccatgcaacgtaagttggaaaagatggctgatcaagctatgacccaaatgtataaacaggctagatctgaggacaagagggcaaaagttactagtgctatgcagacaatgcttttcactatgcttagaaagttggataatgatgcactcaacaacattatcaacaatgcaagagatggttgtgttcccttgaacataatacctcttacaacagcagccaaactaatggttgtcataccagactataacacatataaaaatacgtgtgatggtacaacatttacttatgcatcagcattgtgggaaatccaacaggttgtagatgcagatagtaaaattgttcaacttagtgaaattagtatggacaattcacctaatttagcatggcctcttattgtaacagctttaagggccaattctgctgtcaaattacagaataatgagcttagtcctgttgcactacgacagatgtcttgtgctgccggtactacacaaactgcttgcactgatgacaatgcgttagcttactacaacacaacaaagggaggtaggtttgtacttgcactgttatccgatttacaggatttgaaatgggctagattccctaagagtgatggaactggtactatctatacagaactggaaccaccttgtaggtttgttacagacacacctaaaggtcctaaagtgaagtatttatactttattaaaggattaaacaacctaaatagaggtatggtacttggtagtttagctgccacagtacgtctacaagctggtaatgcaacagaagtgcctgccaattcaactgtattatctttctgtgcttttgctgtagatgctgctaaagcttacaaagattatctagctagtgggggacaaccaatcactaattgtgttaagatgttgtgtacacacactggtactggtcaggcaataacagttacaccggaagccaatatggatcaagaatcctttggtggtgcatcgtgttgtctgtactgccgttgccacatagatcatccaaatcctaaaggattttgtgacttaaaaggtaagtatgtacaaatacctacaacttgtgctaatgaccctgtgggttttacacttaaaaacacagtctgtaccgtctgcggtatgtggaaaggttatggctgtagttgtgatcaactccgcgaacccatgcttcagtcagctgatgcacaatcgtttttaaacgggtttgcggtgtaagtgcagcccgtcttacaccgtgcggcacaggcactagtactgatgtcgtatacagggcttttgacatctacaatgataaagtagctggttttgctaaattcctaaaaactaattgttgtcgcttccaagaaaaggacgaagatgacaatttaattgattcttactttgtagttaagagacacactttctctaactaccaacatgaagaaacaatttataatttacttaaggattgtccagctgttgctaaacatgacttctttaagtttagaatagacggtgacatggtaccacatatatcacgtcaacgtcttactaaatacacaatggcagacctcgtctatgctttaaggcattttgatgaaggtaattgtgacacattaaaagaaatacttgtcacatacaattgttgtgatgatgattatttcaataaaaaggactggtatgattttgtagaaaacccagatatattacgcgtatacgccaacttaggtgaacgtgtacgccaagctttgttaaaaacagtacaattctgtgatgccatgcgaaatgctggtattgttggtgtactgacattagataatcaagatctcaatggtaactggtatgatttcggtgatttcatacaaaccacgccaggtagtggagttcctgttgtagattcttattattcattgttaatgcctatattaaccttgaccagggctttaactgcagagtcacatgttgacactgacttaacaaagccttacattaagtgggatttgttaaaatatgacttcacggaagagaggttaaaactctttgaccgttattttaaatattgggatcagacataccacccaaattgtgttaactgtttggatgacagatgcattctgcattgtgcaaactttaatgttttattctctacagtgttcccacctacaagttttggaccactagtgagaaaaatatttgttgatggtgttccatttgtagtttcaactggataccacttcagagagctaggtgttgtacataatcaggatgtaaacttacatagctctagacttagttttaaggaattacttgtgtatgctgctgaccctgctatgcacgctgcttctggtaatctattactagataaacgcactacgtgcttttcagtagctgcacttactaacaatgttgcttttcaaactgtcaaacccggtaattttaacaaagacttctatgactttgctgtgtctaagggtttctttaaggaaggaagttctgttgaattaaaacacttcttctttgctcaggatggtaatgctgctatcagcgattatgactactatcgttataatctaccaacaatgtgtgatatcagacaactactatttgtagttgaagttgttgataagtactttgattgttacgatggtggctgtattaatgctaaccaagtcatcgtcaacaacctagacaaatcagctggttttccatttaataaatggggtaaggctagactttattatgattcaatgagttatgaggatcaagatgcacttttcgcatatacaaaacgtaatgtcatccctactataactcaaatgaatcttaagtatgccattagtgcaaagaatagagctcgcaccgtagctggtgtctctatctgtagtactatgaccaatagacagtttcatcaaaaattattgaaatcaatagccgccactagaggagctactgtagtaattggaacaagcaaattctatggtggttggcacaacatgttaaaaactgtttatagtgatgtagaaaaccctcaccttatgggttgggattatcctaaatgtgatagagccatgcctaacatgcttagaattatggcctcacttgttcttgctcgcaaacatacaacgtgttgtagcttgtcacaccgtttctatagattagctaatgagtgtgctcaagtattgagtgaaatggtcatgtgtggcggttcactatatgttaaaccaggtggaacctcatcaggagatgccacaactgcttatgctaatagtgtttttaacatttgtcaagctgtcacggccaatgttaatgcacttttatctactgatggtaacaaaattgccgataagtatgtccgcaatttacaacacagactttatgagtgtctctatagaaatagagatgttgacacagactttgtgaatgagttttacgcatatttgcgtaaacatttctcaatgatgatactctctgacgatgctgttgtgtgtttcaatagcacttatgcatctcaaggtctagtggctagcataaagaactttaagtcagttctttattatcaaaacaatgtttttatgtctgaagcaaaatgttggactgagactgaccttactaaaggacctcatgaattttgctctcaacatacaatgctagttaaacagggtgatgattatgtgtaccttccttacccagatccatcaagaatcctaggggccggctgttttgtagatgatatcgtaaaaacagatggtacacttatgattgaacggttcgtgtctttagctatagatgcttacccacttactaaacatcctaatcaggagtatgctgatgtctttcatttgtacttacaatacataagaaagctacatgatgagttaacaggacacatgttagacatgtattctgttatgcttactaatgataacacttcaaggtattgggaacctgagttttatgaggctatgtacacaccgcatacagtcttacaggctgttggggcttgtgttctttgcaattcacagacttcattaagatgtggtgcttgcatacgtagaccattcttatgttgtaaatgctgttacgaccatgtcatatcaacatcacataaattagtcttgtctgttaatccgtatgtttgcaatgctccaggttgtgatgtcacagatgtgactcaactttacttaggaggtatgagctattattgtaaatcacataaaccacccattagttttccattgtgtgctaatggacaagtttttggtttatataaaaatacatgtgttggtagcgataatgttactgactttaatgcaattgcaacatgtgactggacaaatgctggtgattacattttagctaacacctgtactgaaagactcaagctttttgcagcagaaacgctcaaagctactgaggagacatttaaactgtcttatggtattgctactgtacgtgaagtgctgtctgacagagaattacatctttcatgggaagttggtaaacctagaccaccacttaaccgaaattatgtctttactggttatcgtgtaactaaaaacagtaaagtacaaataggagagtacacctttgaaaaaggtgactatggtgatgctgttgtttaccgaggtacaacaacttacaaattaaatgttggtgattattttgtgctgacatcacatacagtaatgccattaagtgcacctacactagtgccacaagagcactatgttagaattactggcttatacccaacactcaatatctcagatgagttttctagcaatgttgcaaattatcaaaaggttggtatgcaaaagtattctacactccagggaccacctggtactggtaagagtcattttgctattggcctagctctctactacccttctgctcgcatagtgtatacagcttgctctcatgccgctgttgatgcactatgtgagaaggcattaaaatatttgcctatagataaatgtagtagaattatacctgcacgtgctcgtgtagagtgttttgataaattcaaagtgaattcaacattagaacagtatgtcttttgtactgtaaatgcattgcctgagacgacagcagatatagttgtctttgatgaaatttcaatggccacaaattatgatttgagtgttgtcaatgccagattacgtgctaagcactatgtgtacattggcgaccctgctcaattacctgcaccacgcacattgctaactaagggcacactagaaccagaatatttcaattcagtgtgtagacttatgaaaactataggtccagacatgttcctcggaacttgtcggcgttgtcctgctgaaattgttgacactgtgagtgctttggtttatgataataagcttaaagcacataaagacaaatcagctcaatgctttaaaatgttttataagggtgttatcacgcatgatgtttcatctgcaattaacaggccacaaataggcgtggtaagagaattccttacacgtaaccctgcttggagaaaagctgtctttatttcaccttataattcacagaatgctgtagcctcaaagattttgggactaccaactcaaactgttgattcatcacagggctcagaatatgactatgtcatattcactcaaaccactgaaacagctcactcttgtaatgtaaacagatttaatgttgctattaccagagcaaaagtaggcatactttgcataatgtctgatagagacctttatgacaagttgcaatttacaagtcttgaaattccacgtaggaatgtggcaactttacaagctgaaaatgtaacaggactctttaaagattgtagtaaggtaatcactgggttacatcctacacaggcacctacacacctcagtgttgacactaaattcaaaactgaaggtttatgtgttgacatacctggcatacctaaggacatgacctatagaagactcatctctatgatgggttttaaaatgaattatcaagttaatggttaccctaacatgtttatcacccgcgaagaagctataagacatgtacgtgcatggattggcttcgatgtcgaggggtgtcatgctactagagaagctgttggtaccaatttacctttacagctaggtttttctacaggtgttaacctagttgctgtacctacaggttatgttgatacacctaataatacagatttttccagagttagtgctaaaccaccgcctggagatcaatttaaacacctcataccacttatgtacaaaggacttccttggaatgtagtgcgtataaagattgtacaaatgttaagtgacacacttaaaaatctctctgacagagtcgtatttgtcttatgggcacatggctttgagttgacatctatgaagtattttgtgaaaataggacctgagcgcacctgttgtctatgtgatagacgtgccacatgcttttccactgcttcagacacttatgcctgttggcatcattctattggatttgattacgtctataatccgtttatgattgatgttcaacaatggggttttacaggtaacctacaaagcaaccatgatctgtattgtcaagtccatggtaatgcacatgtagctagttgtgatgcaatcatgactaggtgtctagctgtccacgagtgctttgttaagcgtgttgactggactattgaatatcctataattggtgatgaactgaagattaatgcggcttgtagaaaggttcaacacatggttgttaaagctgcattattagcagacaaattcccagttcttcacgacattggtaaccctaaagctattaagtgtgtacctcaagctgatgtagaatggaagttctatgatgcacagccttgtagtgacaaagcttataaaatagaagaattattctattcttatgccacacattctgacaaattcacagatggtgtatgcctattttggaattgcaatgtcgatagatatcctgctaattccattgtttgtagatttgacactagagtgctatctaaccttaacttgcctggttgtgatggtggcagtttgtatgtaaataaacatgcattccacacaccagcttttgataaaagtgcttttgttaatttaaaacaattaccatttttctattactctgacagtccatgtgagtctcatggaaaacaagtagtgtcagatatagattatgtaccactaaagtctgctacgtgtataacacgttgcaatttaggtggtgctgtctgtagacatcatgctaatgagtacagattgtatctcgatgcttataacatgatgatctcagctggctttagcttgtgggtttacaaacaatttgatacttataacctctggaacacttttacaagacttcagagtttagaaaatgtggcttttaatgttgtaaataagggacactttgatggacaacagggtgaagtaccagtttctatcattaataacactgtttacacaaaagttgatggtgttgatgtagaattgtttgaaaataaaacaacattacctgttaatgtagcatttgagctttgggctaagcgcaacattaaaccagtaccagaggtgaaaatactcaataatttgggtgtggacattgctgctaatactgtgatctgggactacaaaagagatgctccagcacatatatctactattggtgtttgttctatgactgacatagccaagaaaccaactgaaacgatttgtgcaccactcactgtcttttttgatggtagagttgatggtcaagtagacttatttagaaatgcccgtaatggtgttcttattacagaaggtagtgttaaaggtttacaaccatctgtaggtcccaaacaagctagtcttaatggagtcacattaattggagaagccgtaaaaacacagttcaattattataagaaagttgatggtgttgtccaacaattacctgaaacttactttactcagagtagaaatttacaagaatttaaacccaggagtcaaatggaaattgatttcttagaattagctatggatgaattcattgaacggtataaattagaaggctatgccttcgaacatatcgtttatggagattttagtcatagtcagttaggtggtttacatctactgattggactagctaaacgttttaaggaatcaccttttgaattagaagattttattcctatggacagtacagttaaaaactatttcataacagatgcgcaaacaggttcatctaagtgtgtgtgttctgttattgatttattacttgatgattttgttgaaataataaaatcccaagatttatctgtagtttctaaggttgtcaaagtgactattgactatacagaaatttcatttatgctttggtgtaaagatggccatgtagaaacattttacccaaaattacaatctagtcaagcgtggcaaccgggtgttgctatgcctaatctttacaaaatgcaaagaatgctattagaaaagtgtgaccttcaaaattatggtgatagtgcaacattacctaaaggcataatgatgaatgtcgcaaaatatactcaactgtgtcaatatttaaacacattaacattagctgtaccctataatatgagagttatacattttggtgctggttctgataaaggagttgcaccaggtacagctgttttaagacagtggttgcctacgggtacgctgcttgtcgattcagatcttaatgactttgtctctgatgcagattcaactttgattggtgattgtgcaactgtacatacagctaataaatgggatctcattattagtgatatgtacgaccctaagactaaaaatgttacaaaagaaaatgactctaaagagggttttttcacttacatttgtgggtttatacaacaaaagctagctcttggaggttccgtggctataaagataacagaacattcttggaatgctgatctttataagctcatgggacacttcgcatggtggacagcctttgttactaatgtgaatgcgtcatcatctgaagcatttttaattggatgtaattatcttggcaaaccacgcgaacaaatagatggttatgtcatgcatgcaaattacatattttggaggaatacaaatccaattcagttgtcttcctattctttatttgacatgagtaaatttccccttaaattaaggggtactgctgttatgtctttaaaagaaggtcaaatcaatgatatgattttatctcttcttagtaaaggtagacttataattagagaaaacaacagagttgttatttctagtgatgttcttgttaacaactaaacgaacaatggtcttcacactcgaagatttcgttggggactggcgacagacagccggctacaacctggaccaagtccttgaacagggaggtgtgtccagtttgtttcagaatctcggggtgtccgtaactccgatccaaaggattgtcctgagcggtgaaaatgggctgaagatcgacatccatgtcatcatcccgtatgaaggtctgagcggcgaccaaatgggccagatcgaaaaaatttttaaggtggtgtaccctgtggatgatcatcactttaaggtgatcctgcactatggcacactggtaatcgacggggttacgccgaacatgatcgactatttcggacggccgtatgaaggcatcgccgtgttcgacggcaaaaagatcactgtaacagggaccctgtggaacggcaacaaaattatcgacgagcgcctgatcaaccccgacggctccctgctgttccgagtaaccatcaacggagtgaccggctggcggctgtgcgaacgcattctggcgtaaacgaacttatggatttgtttatgagaatcttcacaattggaactgtaactttgaagcaaggtgaaatcaaggatgctactccttcagattttgttcgcgctactgcaacgataccgatacaagcctcactccctttcggatggcttattgttggcgttgcacttcttgctgtttttcagagcgcttccaaaatcataaccctcaaaaagagatggcaactagcactctccaagggtgttcactttgtttgcaacttgctgttgttgtttgtaacagtttactcacaccttttgctcgttgctgctggccttgaagccccttttctctatctttatgctttagtctacttcttgcagagtataaactttgtaagaataataatgaggctttggctttgctggaaatgccgttccaaaaacccattactttatgatgccaactattttctttgctggcatactaattgttacgactattgtataccttacaatagtgtaacttcttcaattgtcattacttcaggtgatggcacaacaagtcctatttctgaacatgactaccagattggtggttatactgaaaaatgggaatctggagtaaaagactgtgttgtattacacagttacttcacttcagactattaccagctgtactcaactcaattgagtacagacactggtgttgaacatgttaccttcttcatctacaataaaattgttgatgagcctgaagaacatgtccaaattcacacaatcgacggttcatccggagttgttaatccagtaatggaaccaatttatgatgaaccgacgacgactactagcgtgcctttgtaagcacaagctgatgagtacgaacttatgatcgagcaggatggcctgcatgccggatctccagctgcctgggttgagagactgttcggctatgattgggcccagcagaccatcggctgttctgatgccgccgtgtttagactgagtgcccagggtagacccgtgctgttcgtgaaaaccgatctgtctggcgccctgaacgagctgcaggatgaagccgctagactgagctggctggctacaacaggcgtgccatgtgctgccgtgctggatgtggttacagaggccggaagagactggctgctgctgggagaagttccaggccaggatctgctgagcagtcatctggcccctgccgagaaggtgtccattatggccgatgccatgcggcggctgcacacacttgatcctgccacctgtcctttcgaccaccaagccaagcaccggatcgagagggccagaaccagaatggaagccggcctggtggaccaggacgacctggatgaagaacaccaaggactggccccagctgagctgttcgccagactgaaagccagaatgcccgacggcgaggatctggtggttacacatggggatgcctgcctgcctaacatcatggtggaaaacggccggttcagcggctttatcgactgtggcagactgggcgtcgccgacagatatcaggatatcgccctggccaccagagatatcgccgaagaacttggcggagagtgggccgatagattcctggtgctgtacggaatcgccgctcctgactctcagcggatcgccttctacagactgctggacgagttcttctgagtgacaacagatgtttcatctcgttgactttcaggttactatagcagagatattactaattattatgaggacttttaaagtttccatttggaatcttgattacatcataaacctcataattaaaaatttatctaagtcactaactgagaataaatattctcaattagatgaagagcaaccaatggagattgattaaacgaacatgaaaattattcttttcttggcactgataacactcgctacttgtgagctttatcactaccaagagtgtgttagaggtacaacagtacttttaaaagaaccttgctcttctggaacatacgagggcaattcaccatttcatcctctagctgataacaaatttgcactgacttgctttagcactcaatttgcttttgcttgtcctgacggcgtaaaacacgtctatcagttacgtgccagatcagtttcacctaaactgttcatcagacaagaggaagttcaagaactttactctccaatttttcttattgttgcggcaatagtgtttataacactttgcttcacactcaaaagaaagacagaatgattgaactttcattaattgacttctatttgtgctttttagcctttctgctattccttgttttaattatgcttattatcttttggttctcacttgaactgcaagatcataatgaaacttgtcacgcctaaacgaacatgaaatttcttgttttcttaggaatcatcacaactgtagctgcatttcaccaagaatgtagtttacagtcatgtactcaacatcaaccatatgtagttgatgacccgtgtcctattcacttctattctaaatggtatattagagtaggagctagaaaatcagcacctttaattgaattgtgcgtggatgaggctggttctaaatcacccattcagtacatcgatatcggtaattatacagtttcctgtttaccttttacaattaattgccaggaacctaaattgggtagtcttgtagtgcgttgttcgttctatgaagactttttagagtatcatgacgttcgtgttgttttagatttcatctaaacgaacaaactaaaatgtctgataatggaccccaaaatcagcgaaatgcaccccgcattacgtttggtggaccctcagattcaactggcagtaaccagaatggagaacgcagtggggcgcgatcaaaacaacgtcggccccaaggtttacccaataatactgcgtcttggttcaccgctctcactcaacatggcaaggaagaccttaaattccctcgaggacaaggcgttccaattaacaccaatagcagtccagatgaccaaattggctactaccgaagagctaccagacgaattcgtggtggtgacggtaaaatgaaagatctcagtccaagatggtatttctactacctaggaactgggccagaagctggacttccctatggtgctaacaaagacggcatcatatgggttgcaactgagggagccttgaatacaccaaaagatcacattggcacccgcaatcctgctaacaatgctgcaatcgtgctacaacttcctcaaggaacaacattgccaaaaggcttctacgcagaagggagcagaggcggcagtcaagcctcttctcgttcctcatcacgtagtcgcaacagttcaagaaattcaactccaggcagcagtaggggaacttctcctgctagaatggctggcaatggcggtgatgctgctcttgctttgctgctgcttgacagattgaaccagcttgagagcaaaatgtctggtaaaggccaacaacaacaaggccaaactgtcactaagaaatctgctgctgaggcttctaagaagcctcggcaaaaacgtactgccactaaagcatacaatgtaacacaagctttcggcagacgtggtccagaacaaacccaaggaaattttggggaccaggaactaatcagacaaggaactgattacaaacattggccgcaaattgcacaatttgcccccagcgcttcagcgttcttcggaatgtcgcgcattggcatggaagtcacaccttcgggaacgtggttgacctacacaggtgccatcaaattggatgacaaagatccaaatttcaaagatcaagtcattttgctgaataagcatattgacgcatacaaaacattcccaccaacagagcctaaaaaggacaaaaagaagaaggctgatgaaactcaagccttaccgcagagacagaagaaacagcaaactgtgactcttcttcctgctgcagatttggatgatttctccaaacaattgcaacaatccatgagcagtgctgactcaactcaggcctaaactcatgcagaccacacaaggcagatgggctatataaacgttttcgcttttccgtttacgatatatagtctactcttgtgcagaatgaattctcgtaactacatagcacaagtagatgtagttaactttaatctcacatagcaatctttaatcagtgtgtaacattagggaggacttgaaagagccaccacattttcaccgaggccacgcggagtacgatcgagtgtacagtgaacaatgctagggagagctgcctatatggaagagccctaatgtgtaaaattaattttagtagtgctatccccatgtgattttaatagcttcttaggagaatgacaaaaaaaaaaaaaaaaaaaaaaaaaagggtcggcatggcatctccacctcctcgcggtccgacctgggcatccgaaggaggacgcacgtccactcggatggctaagggagagcctgcagtagcataaccccttggggcctctaaacgggtcttgaggggttttttg

SEQ ID NO: 6 - DNA, 34950 bp, Artificial Sequence
  CMV-T7-scv2-nanoluc replicon
gcggccgctaatacgactcactatagattaaaggtttataccttcccaggtaacaaaccaaccaactttcgatctcttgtagatctgttctctaaacgaactttaaaatctgtgtggctgtcactcggctgcatgcttagtgcactcacgcagtataattaataactaattactgtcgttgacaggacacgagtaactcgtctatcttctgcaggctgcttacggtttcgtccgtgttgcagccgatcatcagcacatctaggtttcgtccgggtgtgaccgaaaggtaagatggagagccttgtccctggtttcaacgagaaaacacacgtccaactcagtttgcctgttttacaggttcgcgacgtgctcgtacgtggctttggagactccgtggaggaggtcttatcagaggcacgtcaacatcttaaagatggcacttgtggcttagtagaagttgaaaaaggcgttttgcctcaacttgaacagccctatgtgttcatcaaacgttcggatgctcgaactgcacctcatggtcatgttatggttgagctggtagcagaactcgaaggcattcagtacggtcgtagtggtgagacacttggtgtccttgtccctcatgtgggcgaaataccagtggcttaccgcaaggttcttcttcgtaagaacggtaataaaggagctggtggccatagttacggcgccgatctaaagtcatttgacttaggcgacgagcttggcactgatccttatgaagattttcaagaaaactggaacactaaacatagcagtggtgttacccgtgaactcatgcgtgagcttaacggaggggcatacactcgctatgtcgataacaacttctgtggccctgatggctaccctcttgagtgcattaaagaccttctagcacgtgctggtaaagcttcatgcactttgtccgaacaactggactttattgacactaagaggggtgtatactgctgccgtgaacatgagcatgaaattgcttggtacacggaacgttctgaaaagagctatgaattgcagacaccttttgaaattaaattggcaaagaaatttgacaccttcaatggggaatgtccaaattttgtatttcccttaaattccataatcaagactattcaaccaagggttgaaaagaaaaagcttgatggctttatgggtagaattcgatctgtctatccagttgcgtcaccaaatgaatgcaaccaaatgtgcctttcaactctcatgaagtgtgatcattgtggtgaaacttcatggcagacgggcgattttgttaaagccacttgcgaattttgtggcactgagaatttgactaaagaaggtgccactacttgtggttacttaccccaaaatgctgttgttaaaatttattgtccagcatgtcacaattcagaagtaggacctgagcatagtcttgccgaataccataatgaatctggcttgaaaaccattcttcgtaagggtggtcgcactattgcctttggaggctgtgtgttctcttatgttggttgccataacaagtgtgcctattgggttccacgtgctagcgctaacataggttgtaaccatacaggtgttgttggagaaggttccgaaggtcttaatgacaaccttcttgaaatactccaaaaagagaaagtcaacatcaatattgttggtgactttaaacttaatgaagagatcgccattattttggcatctttttctgcttccacaagtgcttttgtggaaactgtgaaaggtttggattataaagcattcaaacaaattgttgaatcctgtggtaattttaaagttacaaaaggaaaagctaaaaaaggtgcctggaatattggtgaacagaaatcaatactgagtcctctttatgcatttgcatcagaggctgctcgtgttgtacgatcaattttctcccgcactcttgaaactgctcaaaattctgtgcgtgttttacagaaggccgctataacaatactagatggaatttcacagtattcactgagactcattgatgctatgatgttcacatctgatttggctactaacaatctagttgtaatggcctacattacaggtggtgttgttcagttgacttcgcagtggctaactaacatctttggcactgtttatgaaaaactcaaacccgtccttgattggcttgaagagaagtttaaggaaggtgtagagtttcttagagacggttgggaaattgttaaatttatctcaacctgtgcttgtgaaattgtcggtggacaaattgtcacctgtgcaaaggaaattaaggagagtgttcagacattctttaagcttgtaaataaatttttggctttgtgtgctgactctatcattattggtggagctaaacttaaagccttgaatttaggtgaaacatttgtcacgcactcaaagggattgtacagaaagtgtgttaaatccagagaagaaactggcctactcatgcctctaaaagccccaaaagaaattatcttcttagagggagaaacacttcccacagaagtgttaacagaggaagttgtcttgaaaactggtgatttacaaccattagaacaacctactagtgaagctgttgaagctccattggttggtacaccagtttgtattaacgggcttatgttgctcgaaatcaaagacacagaaaagtactgtgcccttgcacctaatatgatggtaacaaacaataccttcacactcaaaggcggtgcaccaacaaaggttacttttggtgatgacactgtgatagaagtgcaaggttacaagagtgtgaatatcacttttgaacttgatgaaaggattgataaagtacttaatgagaagtgctctgcctatacagttgaactcggtacagaagtaaatgagttcgcctgtgttgtggcagatgctgtcataaaaactttgcaaccagtatctgaattacttacaccactgggcattgatttagatgagtggagtatggctacatactacttatttgatgagtctggtgagtttaaattggcttcacatatgtattgttctttctaccctccagatgaggatgaagaagaaggtgattgtgaagaagaagagtttgagccatcaactcaatatgagtatggtactgaagatgattaccaaggtaaacctttggaatttggtgccacttctgctgctcttcaacctgaagaagagcaagaagaagattggttagatgatgatagtcaacaaactgttggtcaacaagacggcagtgaggacaatcagacaactactattcaaacaattgttgaggttcaacctcaattagagatggaacttacaccagttgttcagactattgaagtgaatagttttagtggttatttaaaacttactgacaatgtatacattaaaaatgcagacattgtggaagaagctaaaaaggtaaaaccaacagtggttgttaatgcagccaatgtttaccttaaacatggaggaggtgttgcaggagccttaaataaggctactaacaatgccatgcaagttgaatctgatgattacatagctactaatggaccacttaaagtgggtggtagttgtgttttaagcggacacaatcttgctaaacactgtcttcatgttgtcggcccaaatgttaacaaaggtgaagacattcaacttcttaagagtgcttatgaaaattttaatcagcacgaagttctacttgcaccattattatcagctggtatttttggtgctgaccctatacattctttaagagtttgtgtagatactgttcgcacaaatgtctacttagctgtctttgataaaaatctctatgacaaacttgtttcaagctttttggaaatgaagagtgaaaagcaagttgaacaaaagatcgctgagattcctaaagaggaagttaagccatttataactgaaagtaaaccttcagttgaacagagaaaacaagatgataagaaaatcaaagcttgtgttgaagaagttacaacaactctggaagaaactaagttcctcacagaaaacttgttactttatattgacattaatggcaatcttcatccagattctgccactcttgttagtgacattgacatcactttcttaaagaaagatgctccatatatagtgggtgatgttgttcaagagggtgttttaactgctgtggttatacctactaaaaaggctggtggcactactgaaatgctagcgaaagctttgagaaaagtgccaacagacaattatataaccacttacccgggtcagggtttaaatggttacactgtagaggaggcaaagacagtgcttaaaaagtgtaaaagtgccttttacattctaccatctattatctctaatgagaagcaagaaattcttggaactgtttcttggaatttgcgagaaatgcttgcacatgcagaagaaacacgcaaattaatgcctgtctgtgtggaaactaaagccatagtttcaactatacagcgtaaatataagggtattaaaatacaagagggtgtggttgattatggtgctagattttacttttacaccagtaaaacaactgtagcgtcacttatcaacacacttaacgatctaaatgaaactcttgttacaatgccacttggctatgtaacacatggcttaaatttggaagaagctgctcggtatatgagatctctcaaagtgccagctacagtttctgtttcttcacctgatgctgttacagcgtataatggttatcttacttcttcttctaaaacacctgaagaacattttattgaaaccatctcacttgctggttcctataaagattggtcctattctggacaatctacacaactaggtatagaatttcttaagagaggtgataaaagtgtatattacactagtaatcctaccacattccacctagatggtgaagttatcacctttgacaatcttaagacacttctttctttgagagaagtgaggactattaaggtgtttacaacagtagacaacattaacctccacacgcaagttgtggacatgtcaatgacatatggacaacagtttggtccaacttatttggatggagctgatgttactaaaataaaacctcataattcacatgaaggtaaaacattttatgttttacctaatgatgacactctacgtgttgaggcttttgagtactaccacacaactgatcctagttttctgggtaggtacatgtcagcattaaatcacactaaaaagtggaaatacccacaagttaatggtttaacttctattaaatgggcagataacaactgttatcttgccactgcattgttaacactccaacaaatagagttgaagtttaatccacctgctctacaagatgcttattacagagcaagggctggtgaagctgctaacttttgtgcacttatcttagcctactgtaataagacagtaggtgagttaggtgatgttagagaaacaatgagttacttgtttcaacatgccaatttagattcttgcaaaagagtcttgaacgtggtgtgtaaaacttgtggacaacagcagacaacccttaagggtgtagaagctgttatgtacatgggcacactttcttatgaacaatttaagaaaggtgttcagataccttgtacgtgtggtaaacaagctacaaaatatctagtacaacaggagtcaccttttgttatgatgtcagcaccacctgctcagtatgaacttaagcatggtacatttacttgtgctagtgagtacactggtaattaccagtgtggtcactataaacatataacttctaaagaaactttgtattgcatagacggtgctttacttacaaagtcctcagaatacaaaggtcctattacggatgttttctacaaagaaaacagttacacaacaaccataaaaccagttacttataaattggatggtgttgtttgtacagaaattgaccctaagttggacaattattataagaaagacaattcttatttcacagagcaaccaattgatcttgtaccaaaccaaccatatccaaacgcaagcttcgataattttaagtttgtatgtgataatatcaaatttgctgatgatttaaaccagttaactggttataagaaacctgcttcaagagagcttaaagttacatttttccctgacttaaatggtgatgtggtggctattgattataaacactacacaccctcttttaagaaaggagctaaattgttacataaacctattgtttggcatgttaacaatgcaactaataaagccacgtataaaccaaatacctggtgtatacgttgtctttggagcacaaaaccagttgaaacatcaaattcgtttgatgtactgaagtcagaggacgcgcagggaatggataatcttgcctgcgaagatctaaaaccagtctctgaagaagtagtggaaaatcctaccatacagaaagacgttcttgagtgtaatgtgaaaactaccgaagttgtaggagacattatacttaaaccagcaaataatagtttaaaaattacagaagaggttggccacacagatctaatggctgcttatgtagacaattctagtcttactattaagaaacctaatgaattatctagagtattaggtttgaaaacccttgctactcatggtttagctgctgttaatagtgtcccttgggatactatagctaattatgctaagccttttcttaacaaagttgttagtacaactactaacatagttacacggtgtttaaaccgtgtttgtactaattatatgccttatttctttactttattgctacaattgtgtacttttactagaagtacaaattctagaattaaagcatctatgccgactactatagcaaagaatactgttaagagtgtcggtaaattttgtctagaggcttcatttaattatttgaagtcacctaatttttctaaactgataaatattataatttggtttttactattaagtgtttgcctaggttctttaatctactcaaccgctgctttaggtgttttaatgtctaatttaggcatgccttcttactgtactggttacagagaaggctatttgaactctactaatgtcactattgcaacctactgtactggttctataccttgtagtgtttgtcttagtggtttagattctttagacacctatccttctttagaaactatacaaattaccatttcatcttttaaatgggatttaactgcttttggcttagttgcagagtggtttttggcatatattcttttcactaggtttttctatgtacttggattggctgcaatcatgcaattgtttttcagctattttgcagtacattttattagtaattcttggcttatgtggttaataattaatcttgtacaaatggccccgatttcagctatggttagaatgtacatcttctttgcatcattttattatgtatggaaaagttatgtgcatgttgtagacggttgtaattcatcaacttgtatgatgtgttacaaacgtaatagagcaacaagagtcgaatgtacaactattgttaatggtgttagaaggtccttttatgtctatgctaatggaggtaaaggcttttgcaaactacacaattggaattgtgttaattgtgatacattctgtgctggtagtacatttattagtgatgaagttgcgagagacttgtcactacagtttaaaagaccaataaatcctactgaccagtcttcttacatcgttgatagtgttacagtgaagaatggttccatccatctttactttgataaagctggtcaaaagacttatgaaagacattctctctctcattttgttaacttagacaacctgagagctaataacactaaaggttcattgcctattaatgttatagtttttgatggtaaatcaaaatgtgaagaatcatctgcaaaatcagcgtctgtttactacagtcagcttatgtgtcaacctatactgttactagatcaggcattagtgtctgatgttggtgatagtgcggaagttgcagttaaaatgtttgatgcttacgttaatacgttttcatcaacttttaacgtaccaatggaaaaactcaaaacactagttgcaactgcagaagctgaacttgcaaagaatgtgtccttagacaatgtcttatctacttttatttcagcagctcggcaagggtttgttgattcagatgtagaaactaaagatgttgttgaatgtcttaaattgtcacatcaatctgacatagaagttactggcgatagttgtaataactatatgctcacctataacaaagttgaaaacatgacaccccgtgaccttggtgcttgtattgactgtagtgcgcgtcatattaatgcgcaggtagcaaaaagtcacaacattgctttgatatggaacgttaaagatttcatgtcattgtctgaacaactacgaaaacaaatacgtagtgctgctaaaaagaataacttaccttttaagttgacatgtgcaactactagacaagttgttaatgttgtaacaacaaagatagcacttaagggtggtaaaattgttaataattggttgaagcagttaattaaagttacacttgtgttcctttttgttgctgctattttctatttaataacacctgttcatgtcatgtctaaacatactgacttttcaagtgaaatcataggatacaaggctattgatggtggtgtcactcgtgacatagcatctacagatacttgttttgctaacaaacatgctgattttgacacatggtttagccagcgtggtggtagttatactaatgacaaagcttgcccattgattgctgcagtcataacaagagaagtgggttttgtcgtgcctggtttgcctggcacgatattacgcacaactaatggtgactttttgcatttcttacctagagtttttagtgcagttggtaacatctgttacacaccatcaaaacttatagagtacactgactttgcaacatcagcttgtgttttggctgctgaatgtacaatttttaaagatgcttctggtaagccagtaccatattgttatgataccaatgtactagaaggttctgttgcttatgaaagtttacgccctgacacacgttatgtgctcatggatggctctattattcaatttcctaacacctaccttgaaggttctgttagagtggtaacaacttttgattctgagtactgtaggcacggcacttgtgaaagatcagaagctggtgtttgtgtatctactagtggtagatgggtacttaacaatgattattacagatctttaccaggagttttctgtggtgtagatgctgtaaatttacttactaatatgtttacaccactaattcaacctattggtgctttggacatatcagcatctatagtagctggtggtattgtagctatcgtagtaacatgccttgcctactattttatgaggtttagaagagcttttggtgaatacagtcatgtagttgcctttaatactttactattccttatgtcattcactgtactctgtttaacaccagtttactcattcttacctggtgtttattctgttatttacttgtacttgacattttatcttactaatgatgtttcttttttagcacatattcagtggatggttatgttcacacctttagtacctttctggataacaattgcttatatcatttgtatttccacaaagcatttctattggttctttagtaattacctaaagagacgtgtagtctttaatggtgtttcctttagtacttttgaagaagctgcgctgtgcacctttttgttaaataaagaaatgtatctaaagttgcgtagtgatgtgctattacctcttacgcaatataatagatacttagctctttataataagtacaagtattttagtggagcaatggatacaactagctacagagaagctgcttgttgtcatctcgcaaaggctctcaatgacttcagtaactcaggttctgatgttctttaccaaccaccacaaacctctatcacctcagctgttttgcagagtggttttagaaaaatggcattcccatctggtaaagttgagggttgtatggtacaagtaacttgtggtacaactacacttaacggtctttggcttgatgacgtagtttactgtccaagacatgtgatctgcacctctgaagacatgcttaaccctaattatgaagatttactcattcgtaagtctaatcataatttcttggtacaggctggtaatgttcaactcagggttattggacattctatgcaaaattgtgtacttaagcttaaggttgatacagccaatcctaagacacctaagtataagtttgttcgcattcaaccaggacagactttttcagtgttagcttgttacaatggttcaccatctggtgtttaccaatgtgctatgaggcccaatttcactattaagggttcattccttaatggttcatgtggtagtgttggttttaacatagattatgactgtgtctctttttgttacatgcaccatatggaattaccaactggagttcatgctggcacagacttagaaggtaacttttatggaccttttgttgacaggcaaacagcacaagcagctggtacggacacaactattacagttaatgttttagcttggttgtacgctgctgttataaatggagacaggtggtttctcaatcgatttaccacaactcttaatgactttaaccttgtggctatgaagtacaattatgaacctctaacacaagaccatgttgacatactaggacctctttctgctcaaactggaattgccgttttagatatgtgtgcttcattaaaagaattactgcaaaatggtatgaatggacgtaccatattgggtagtgctttattagaagatgaatttacaccttttgatgttgttagacaatgctcaggtgttactttccaaagtgcagtgaaaagaacaatcaagggtacacaccactggttgttactcacaattttgacttcacttttagttttagtccagagtactcaatggtctttgttcttttttttgtatgaaaatgcctttttaccttttgctatgggtattattgctatgtctgcttttgcaatgatgtttgtcaaacataagcatgcatttctctgtttgtttttgttaccttctcttgccactgtagcttattttaatatggtctatatgcctgctagttgggtgatgcgtattatgacatggttggatatggttgatactagtttgtctggttttaagctaaaagactgtgttatgtatgcatcagctgtagtgttactaatccttatgacagcaagaactgtgtatgatgatggtgctaggagagtgtggacacttatgaatgtcttgacactcgtttataaagtttattatggtaatgctttagatcaagccatttccatgtgggctcttataatctctgttacttctaactactcaggtgtagttacaactgtcatgtttttggccagaggtattgtttttatgtgtgttgagtattgccctattttcttcataactggtaatacacttcagtgtataatgctagtttattgtttcttaggctatttttgtacttgttactttggcctcttttgtttactcaaccgctactttagactgactcttggtgtttatgattacttagtttctacacaggagtttagatatatgaattcacagggactactcccacccaagaatagcatagatgccttcaaactcaacattaaattgttgggtgttggtggcaaaccttgtatcaaagtagccactgtacagtctaaaatgtcagatgtaaagtgcacatcagtagtcttactctcagttttgcaacaactcagagtagaatcatcatctaaattgtgggctcaatgtgtccagttacacaatgacattctcttagctaaagatactactgaagcctttgaaaaaatggtttcactactttctgttttgctttccatgcagggtgctgtagacataaacaagctttgtgaagaaatgctggacaacagggcaaccttacaagctatagcctcagagtttagttcccttccatcatatgcagcttttgctactgctcaagaagcttatgagcaggctgttgctaatggtgattctgaagttgttcttaaaaagttgaagaagtctttgaatgtggctaaatctgaatttgaccgtgatgcagccatgcaacgtaagttggaaaagatggctgatcaagctatgacccaaatgtataaacaggctagatctgaggacaagagggcaaaagttactagtgctatgcagacaatgcttttcactatgcttagaaagttggataatgatgcactcaacaacattatcaacaatgcaagagatggttgtgttcccttgaacataatacctcttacaacagcagccaaactaatggttgtcataccagactataacacatataaaaatacgtgtgatggtacaacatttacttatgcatcagcattgtgggaaatccaacaggttgtagatgcagatagtaaaattgttcaacttagtgaaattagtatggacaattcacctaatttagcatggcctcttattgtaacagctttaagggccaattctgctgtcaaattacagaataatgagcttagtcctgttgcactacgacagatgtcttgtgctgccggtactacacaaactgcttgcactgatgacaatgcgttagcttactacaacacaacaaagggaggtaggtttgtacttgcactgttatccgatttacaggatttgaaatgggctagattccctaagagtgatggaactggtactatctatacagaactggaaccaccttgtaggtttgttacagacacacctaaaggtcctaaagtgaagtatttatactttattaaaggattaaacaacctaaatagaggtatggtacttggtagtttagctgccacagtacgtctacaagctggtaatgcaacagaagtgcctgccaattcaactgtattatctttctgtgcttttgctgtagatgctgctaaagcttacaaagattatctagctagtgggggacaaccaatcactaattgtgttaagatgttgtgtacacacactggtactggtcaggcaataacagttacaccggaagccaatatggatcaagaatcctttggtggtgcatcgtgttgtctgtactgccgttgccacatagatcatccaaatcctaaaggattttgtgacttaaaaggtaagtatgtacaaatacctacaacttgtgctaatgaccctgtgggttttacacttaaaaacacagtctgtaccgtctgcggtatgtggaaaggttatggctgtagttgtgatcaactccgcgaacccatgcttcagtcagctgatgcacaatcgtttttaaacgggtttgcggtgtaagtgcagcccgtcttacaccgtgcggcacaggcactagtactgatgtcgtatacagggcttttgacatctacaatgataaagtagctggttttgctaaattcctaaaaactaattgttgtcgcttccaagaaaaggacgaagatgacaatttaattgattcttactttgtagttaagagacacactttctctaactaccaacatgaagaaacaatttataatttacttaaggattgtccagctgttgctaaacatgacttctttaagtttagaatagacggtgacatggtaccacatatatcacgtcaacgtcttactaaatacacaatggcagacctcgtctatgctttaaggcattttgatgaaggtaattgtgacacattaaaagaaatacttgtcacatacaattgttgtgatgatgattatttcaataaaaaggactggtatgattttgtagaaaacccagatatattacgcgtatacgccaacttaggtgaacgtgtacgccaagctttgttaaaaacagtacaattctgtgatgccatgcgaaatgctggtattgttggtgtactgacattagataatcaagatctcaatggtaactggtatgatttcggtgatttcatacaaaccacgccaggtagtggagttcctgttgtagattcttattattcattgttaatgcctatattaaccttgaccagggctttaactgcagagtcacatgttgacactgacttaacaaagccttacattaagtgggatttgttaaaatatgacttcacggaagagaggttaaaactctttgaccgttattttaaatattgggatcagacataccacccaaattgtgttaactgtttggatgacagatgcattctgcattgtgcaaactttaatgttttattctctacagtgttcccacctacaagttttggaccactagtgagaaaaatatttgttgatggtgttccatttgtagtttcaactggataccacttcagagagctaggtgttgtacataatcaggatgtaaacttacatagctctagacttagttttaaggaattacttgtgtatgctgctgaccctgctatgcacgctgcttctggtaatctattactagataaacgcactacgtgcttttcagtagctgcacttactaacaatgttgcttttcaaactgtcaaacccggtaattttaacaaagacttctatgactttgctgtgtctaagggtttctttaaggaaggaagttctgttgaattaaaacacttcttctttgctcaggatggtaatgctgctatcagcgattatgactactatcgttataatctaccaacaatgtgtgatatcagacaactactatttgtagttgaagttgttgataagtactttgattgttacgatggtggctgtattaatgctaaccaagtcatcgtcaacaacctagacaaatcagctggttttccatttaataaatggggtaaggctagactttattatgattcaatgagttatgaggatcaagatgcacttttcgcatatacaaaacgtaatgtcatccctactataactcaaatgaatcttaagtatgccattagtgcaaagaatagagctcgcaccgtagctggtgtctctatctgtagtactatgaccaatagacagtttcatcaaaaattattgaaatcaatagccgccactagaggagctactgtagtaattggaacaagcaaattctatggtggttggcacaacatgttaaaaactgtttatagtgatgtagaaaaccctcaccttatgggttgggattatcctaaatgtgatagagccatgcctaacatgcttagaattatggcctcacttgttcttgctcgcaaacatacaacgtgttgtagcttgtcacaccgtttctatagattagctaatgagtgtgctcaagtattgagtgaaatggtcatgtgtggcggttcactatatgttaaaccaggtggaacctcatcaggagatgccacaactgcttatgctaatagtgtttttaacatttgtcaagctgtcacggccaatgttaatgcacttttatctactgatggtaacaaaattgccgataagtatgtccgcaatttacaacacagactttatgagtgtctctatagaaatagagatgttgacacagactttgtgaatgagttttacgcatatttgcgtaaacatttctcaatgatgatactctctgacgatgctgttgtgtgtttcaatagcacttatgcatctcaaggtctagtggctagcataaagaactttaagtcagttctttattatcaaaacaatgtttttatgtctgaagcaaaatgttggactgagactgaccttactaaaggacctcatgaattttgctctcaacatacaatgctagttaaacagggtgatgattatgtgtaccttccttacccagatccatcaagaatcctaggggccggctgttttgtagatgatatcgtaaaaacagatggtacacttatgattgaacggttcgtgtctttagctatagatgcttacccacttactaaacatcctaatcaggagtatgctgatgtctttcatttgtacttacaatacataagaaagctacatgatgagttaacaggacacatgttagacatgtattctgttatgcttactaatgataacacttcaaggtattgggaacctgagttttatgaggctatgtacacaccgcatacagtcttacaggctgttggggcttgtgttctttgcaattcacagacttcattaagatgtggtgcttgcatacgtagaccattcttatgttgtaaatgctgttacgaccatgtcatatcaacatcacataaattagtcttgtctgttaatccgtatgtttgcaatgctccaggttgtgatgtcacagatgtgactcaactttacttaggaggtatgagctattattgtaaatcacataaaccacccattagttttccattgtgtgctaatggacaagtttttggtttatataaaaatacatgtgttggtagcgataatgttactgactttaatgcaattgcaacatgtgactggacaaatgctggtgattacattttagctaacacctgtactgaaagactcaagctttttgcagcagaaacgctcaaagctactgaggagacatttaaactgtcttatggtattgctactgtacgtgaagtgctgtctgacagagaattacatctttcatgggaagttggtaaacctagaccaccacttaaccgaaattatgtctttactggttatcgtgtaactaaaaacagtaaagtacaaataggagagtacacctttgaaaaaggtgactatggtgatgctgttgtttaccgaggtacaacaacttacaaattaaatgttggtgattattttgtgctgacatcacatacagtaatgccattaagtgcacctacactagtgccacaagagcactatgttagaattactggcttatacccaacactcaatatctcagatgagttttctagcaatgttgcaaattatcaaaaggttggtatgcaaaagtattctacactccagggaccacctggtactggtaagagtcattttgctattggcctagctctctactacccttctgctcgcatagtgtatacagcttgctctcatgccgctgttgatgcactatgtgagaaggcattaaaatatttgcctatagataaatgtagtagaattatacctgcacgtgctcgtgtagagtgttttgataaattcaaagtgaattcaacattagaacagtatgtcttttgtactgtaaatgcattgcctgagacgacagcagatatagttgtctttgatgaaatttcaatggccacaaattatgatttgagtgttgtcaatgccagattacgtgctaagcactatgtgtacattggcgaccctgctcaattacctgcaccacgcacattgctaactaagggcacactagaaccagaatatttcaattcagtgtgtagacttatgaaaactataggtccagacatgttcctcggaacttgtcggcgttgtcctgctgaaattgttgacactgtgagtgctttggtttatgataataagcttaaagcacataaagacaaatcagctcaatgctttaaaatgttttataagggtgttatcacgcatgatgtttcatctgcaattaacaggccacaaataggcgtggtaagagaattccttacacgtaaccctgcttggagaaaagctgtctttatttcaccttataattcacagaatgctgtagcctcaaagattttgggactaccaactcaaactgttgattcatcacagggctcagaatatgactatgtcatattcactcaaaccactgaaacagctcactcttgtaatgtaaacagatttaatgttgctattaccagagcaaaagtaggcatactttgcataatgtctgatagagacctttatgacaagttgcaatttacaagtcttgaaattccacgtaggaatgtggcaactttacaagctgaaaatgtaacaggactctttaaagattgtagtaaggtaatcactgggttacatcctacacaggcacctacacacctcagtgttgacactaaattcaaaactgaaggtttatgtgttgacatacctggcatacctaaggacatgacctatagaagactcatctctatgatgggttttaaaatgaattatcaagttaatggttaccctaacatgtttatcacccgcgaagaagctataagacatgtacgtgcatggattggcttcgatgtcgaggggtgtcatgctactagagaagctgttggtaccaatttacctttacagctaggtttttctacaggtgttaacctagttgctgtacctacaggttatgttgatacacctaataatacagatttttccagagttagtgctaaaccaccgcctggagatcaatttaaacacctcataccacttatgtacaaaggacttccttggaatgtagtgcgtataaagattgtacaaatgttaagtgacacacttaaaaatctctctgacagagtcgtatttgtcttatgggcacatggctttgagttgacatctatgaagtattttgtgaaaataggacctgagcgcacctgttgtctatgtgatagacgtgccacatgcttttccactgcttcagacacttatgcctgttggcatcattctattggatttgattacgtctataatccgtttatgattgatgttcaacaatggggttttacaggtaacctacaaagcaaccatgatctgtattgtcaagtccatggtaatgcacatgtagctagttgtgatgcaatcatgactaggtgtctagctgtccacgagtgctttgttaagcgtgttgactggactattgaatatcctataattggtgatgaactgaagattaatgcggcttgtagaaaggttcaacacatggttgttaaagctgcattattagcagacaaattcccagttcttcacgacattggtaaccctaaagctattaagtgtgtacctcaagctgatgtagaatggaagttctatgatgcacagccttgtagtgacaaagcttataaaatagaagaattattctattcttatgccacacattctgacaaattcacagatggtgtatgcctattttggaattgcaatgtcgatagatatcctgctaattccattgtttgtagatttgacactagagtgctatctaaccttaacttgcctggttgtgatggtggcagtttgtatgtaaataaacatgcattccacacaccagcttttgataaaagtgcttttgttaatttaaaacaattaccatttttctattactctgacagtccatgtgagtctcatggaaaacaagtagtgtcagatatagattatgtaccactaaagtctgctacgtgtataacacgttgcaatttaggtggtgctgtctgtagacatcatgctaatgagtacagattgtatctcgatgcttataacatgatgatctcagctggctttagcttgtgggtttacaaacaatttgatacttataacctctggaacacttttacaagacttcagagtttagaaaatgtggcttttaatgttgtaaataagggacactttgatggacaacagggtgaagtaccagtttctatcattaataacactgtttacacaaaagttgatggtgttgatgtagaattgtttgaaaataaaacaacattacctgttaatgtagcatttgagctttgggctaagcgcaacattaaaccagtaccagaggtgaaaatactcaataatttgggtgtggacattgctgctaatactgtgatctgggactacaaaagagatgctccagcacatatatctactattggtgtttgttctatgactgacatagccaagaaaccaactgaaacgatttgtgcaccactcactgtcttttttgatggtagagttgatggtcaagtagacttatttagaaatgcccgtaatggtgttcttattacagaaggtagtgttaaaggtttacaaccatctgtaggtcccaaacaagctagtcttaatggagtcacattaattggagaagccgtaaaaacacagttcaattattataagaaagttgatggtgttgtccaacaattacctgaaacttactttactcagagtagaaatttacaagaatttaaacccaggagtcaaatggaaattgatttcttagaattagctatggatgaattcattgaacggtataaattagaaggctatgccttcgaacatatcgtttatggagattttagtcatagtcagttaggtggtttacatctactgattggactagctaaacgttttaaggaatcaccttttgaattagaagattttattcctatggacagtacagttaaaaactatttcataacagatgcgcaaacaggttcatctaagtgtgtgtgttctgttattgatttattacttgatgattttgttgaaataataaaatcccaagatttatctgtagtttctaaggttgtcaaagtgactattgactatacagaaatttcatttatgctttggtgtaaagatggccatgtagaaacattttacccaaaattacaatctagtcaagcgtggcaaccgggtgttgctatgcctaatctttacaaaatgcaaagaatgctattagaaaagtgtgaccttcaaaattatggtgatagtgcaacattacctaaaggcataatgatgaatgtcgcaaaatatactcaactgtgtcaatatttaaacacattaacattagctgtaccctataatatgagagttatacattttggtgctggttctgataaaggagttgcaccaggtacagctgttttaagacagtggttgcctacgggtacgctgcttgtcgattcagatcttaatgactttgtctctgatgcagattcaactttgattggtgattgtgcaactgtacatacagctaataaatgggatctcattattagtgatatgtacgaccctaagactaaaaatgttacaaaagaaaatgactctaaagagggttttttcacttacatttgtgggtttatacaacaaaagctagctcttggaggttccgtggctataaagataacagaacattcttggaatgctgatctttataagctcatgggacacttcgcatggtggacagcctttgttactaatgtgaatgcgtcatcatctgaagcatttttaattggatgtaattatcttggcaaaccacgcgaacaaatagatggttatgtcatgcatgcaaattacatattttggaggaatacaaatccaattcagttgtcttcctattctttatttgacatgagtaaatttccccttaaattaaggggtactgctgttatgtctttaaaagaaggtcaaatcaatgatatgattttatctcttcttagtaaaggtagacttataattagagaaaacaacagagttgttatttctagtgatgttcttgttaacaactaaacgaacaatggtcttcacactcgaagatttcgttggggactggcgacagacagccggctacaacctggaccaagtccttgaacagggaggtgtgtccagtttgtttcagaatctcggggtgtccgtaactccgatccaaaggattgtcctgagcggtgaaaatgggctgaagatcgacatccatgtcatcatcccgtatgaaggtctgagcggcgaccaaatgggccagatcgaaaaaatttttaaggtggtgtaccctgtggatgatcatcactttaaggtgatcctgcactatggcacactggtaatcgacggggttacgccgaacatgatcgactatttcggacggccgtatgaaggcatcgccgtgttcgacggcaaaaagatcactgtaacagggaccctgtggaacggcaacaaaattatcgacgagcgcctgatcaaccccgacggctccctgctgttccgagtaaccatcaacggagtgaccggctggcggctgtgcgaacgcattctggcgtaaacgaacttatggatttgtttatgagaatcttcacaattggaactgtaactttgaagcaaggtgaaatcaaggatgctactccttcagattttgttcgcgctactgcaacgataccgatacaagcctcactccctttcggatggcttattgttggcgttgcacttcttgctgtttttcagagcgcttccaaaatcataaccctcaaaaagagatggcaactagcactctccaagggtgttcactttgtttgcaacttgctgttgttgtttgtaacagtttactcacaccttttgctcgttgctgctggccttgaagccccttttctctatctttatgctttagtctacttcttgcagagtataaactttgtaagaataataatgaggctttggctttgctggaaatgccgttccaaaaacccattactttatgatgccaactattttctttgctggcatactaattgttacgactattgtataccttacaatagtgtaacttcttcaattgtcattacttcaggtgatggcacaacaagtcctatttctgaacatgactaccagattggtggttatactgaaaaatgggaatctggagtaaaagactgtgttgtattacacagttacttcacttcagactattaccagctgtactcaactcaattgagtacagacactggtgttgaacatgttaccttcttcatctacaataaaattgttgatgagcctgaagaacatgtccaaattcacacaatcgacggttcatccggagttgttaatccagtaatggaaccaatttatgatgaaccgacgacgactactagcgtgcctttgtaagcacaagctgatgagtacgaacttatgatcgagcaggatggcctgcatgccggatctccagctgcctgggttgagagactgttcggctatgattgggcccagcagaccatcggctgttctgatgccgccgtgtttagactgagtgcccagggtagacccgtgctgttcgtgaaaaccgatctgtctggcgccctgaacgagctgcaggatgaagccgctagactgagctggctggctacaacaggcgtgccatgtgctgccgtgctggatgtggttacagaggccggaagagactggctgctgctgggagaagttccaggccaggatctgctgagcagtcatctggcccctgccgagaaggtgtccattatggccgatgccatgcggcggctgcacacacttgatcctgccacctgtcctttcgaccaccaagccaagcaccggatcgagagggccagaaccagaatggaagccggcctggtggaccaggacgacctggatgaagaacaccaaggactggccccagctgagctgttcgccagactgaaagccagaatgcccgacggcgaggatctggtggttacacatggggatgcctgcctgcctaacatcatggtggaaaacggccggttcagcggctttatcgactgtggcagactgggcgtcgccgacagatatcaggatatcgccctggccaccagagatatcgccgaagaacttggcggagagtgggccgatagattcctggtgctgtacggaatcgccgctcctgactctcagcggatcgccttctacagactgctggacgagttcttctgagtgacaacagatgtttcatctcgttgactttcaggttactatagcagagatattactaattattatgaggacttttaaagtttccatttggaatcttgattacatcataaacctcataattaaaaatttatctaagtcactaactgagaataaatattctcaattagatgaagagcaaccaatggagattgattaaacgaacatgaaaattattcttttcttggcactgataacactcgctacttgtgagctttatcactaccaagagtgtgttagaggtacaacagtacttttaaaagaaccttgctcttctggaacatacgagggcaattcaccatttcatcctctagctgataacaaatttgcactgacttgctttagcactcaatttgcttttgcttgtcctgacggcgtaaaacacgtctatcagttacgtgccagatcagtttcacctaaactgttcatcagacaagaggaagttcaagaactttactctccaatttttcttattgttgcggcaatagtgtttataacactttgcttcacactcaaaagaaagacagaatgattgaactttcattaattgacttctatttgtgctttttagcctttctgctattccttgttttaattatgcttattatcttttggttctcacttgaactgcaagatcataatgaaacttgtcacgcctaaacgaacatgaaatttcttgttttcttaggaatcatcacaactgtagctgcatttcaccaagaatgtagtttacagtcatgtactcaacatcaaccatatgtagttgatgacccgtgtcctattcacttctattctaaatggtatattagagtaggagctagaaaatcagcacctttaattgaattgtgcgtggatgaggctggttctaaatcacccattcagtacatcgatatcggtaattatacagtttcctgtttaccttttacaattaattgccaggaacctaaattgggtagtcttgtagtgcgttgttcgttctatgaagactttttagagtatcatgacgttcgtgttgttttagatttcatctaaacgaacaaactaaaatgtctgataatggaccccaaaatcagcgaaatgcaccccgcattacgtttggtggaccctcagattcaactggcagtaaccagaatggagaacgcagtggggcgcgatcaaaacaacgtcggccccaaggtttacccaataatactgcgtcttggttcaccgctctcactcaacatggcaaggaagaccttaaattccctcgaggacaaggcgttccaattaacaccaatagcagtccagatgaccaaattggctactaccgaagagctaccagacgaattcgtggtggtgacggtaaaatgaaagatctcagtccaagatggtatttctactacctaggaactgggccagaagctggacttccctatggtgctaacaaagacggcatcatatgggttgcaactgagggagccttgaatacaccaaaagatcacattggcacccgcaatcctgctaacaatgctgcaatcgtgctacaacttcctcaaggaacaacattgccaaaaggcttctacgcagaagggagcagaggcggcagtcaagcctcttctcgttcctcatcacgtagtcgcaacagttcaagaaattcaactccaggcagcagtaggggaacttctcctgctagaatggctggcaatggcggtgatgctgctcttgctttgctgctgcttgacagattgaaccagcttgagagcaaaatgtctggtaaaggccaacaacaacaaggccaaactgtcactaagaaatctgctgctgaggcttctaagaagcctcggcaaaaacgtactgccactaaagcatacaatgtaacacaagctttcggcagacgtggtccagaacaaacccaaggaaattttggggaccaggaactaatcagacaaggaactgattacaaacattggccgcaaattgcacaatttgcccccagcgcttcagcgttcttcggaatgtcgcgcattggcatggaagtcacaccttcgggaacgtggttgacctacacaggtgccatcaaattggatgacaaagatccaaatttcaaagatcaagtcattttgctgaataagcatattgacgcatacaaaacattcccaccaacagagcctaaaaaggacaaaaagaagaaggctgatgaaactcaagccttaccgcagagacagaagaaacagcaaactgtgactcttcttcctgctgcagatttggatgatttctccaaacaattgcaacaatccatgagcagtgctgactcaactcaggcctaaactcatgcagaccacacaaggcagatgggctatataaacgttttcgcttttccgtttacgatatatagtctactcttgtgcagaatgaattctcgtaactacatagcacaagtagatgtagttaactttaatctcacatagcaatctttaatcagtgtgtaacattagggaggacttgaaagagccaccacattttcaccgaggccacgcggagtacgatcgagtgtacagtgaacaatgctagggagagctgcctatatggaagagccctaatgtgtaaaattaattttagtagtgctatccccatgtgattttaatagcttcttaggagaatgacaaaaaaaaaaaaaaaaaaaaaaaaaagggtcggcatggcatctccacctcctcgcggtccgacctgggcatccgaaggaggacgcacgtccactcggatggctaagggagagcctgcagtagcataaccccttggggcctctaaacgggtcttgaggggttttttggcggccgcttctatagtgtcacctaaatactagtgactccagcgtaactggactggccacagttaggccgcaaatgtaatcacactggctcaccttcgggtgggcctttctgcgttcgcgagtggacccgataagctcatggagcggcgtaaccgtcgcacaggaaggacagagaaagcgcggatctgggaagtgacggacagaacggtcaggacctggattggggaggcggttgccgccgctgctgctgacggtgtgacgttctctgttccggtcacaccacatacgttccgccattcctatgcgatgcacatgctgtatgccggtataccgctgaaagttctgcaaagcctgatgggacataagtccatcagttcaacggaagtctacacgaaggtttttgcgctggatgtggctgcccggcaccgggtgcagtttgcgatgccggagtctgatgcggttgcgatgctgaaacaattatcctgagaataaatgccttggcctttatatggaaatgtggaactgagtggatatgctgtttttgtctgttaaacagagaagctggctgttatccactgagaagcgaacgaaacagtcgggaaaatctcccattatcgtagagatccgcattattaatctcaggagcctgtgtagcgtttataggaagtagtgttctgtcatgatgcctgcaagcggtaacgaaaacgatttgaatatgccttcaggaacaatagaaatcttcgtgcggtgttacgttgaagtggagcggattatgtcagcaatggacagaacaacctaatgaacacagaaccatgatgtggtctgtccttttacagccagtagtgctcgccgcagtcgagcgacagggcgaagccctcggctggttgccctcgccgctgggctggcggccgtctatggccctgcaaacgcgccagaaacgccgtcgaagccgtgtgcgagacaccgcggccggccgccggcgttgtggatacctcgcggaaaacttggccctcactgacagatgaggggcggacgttgacacttgaggggccgactcacccggcgcggcgttgacagatgaggggcaggctcgatttcggccggcgacgtggagctggccagcctcgcaaatcggcgaaaacgcctgattttacgcgagtttcccacagatgatgtggacaagcctggggataagtgccctgcggtattgacacttgaggggcgcgactactgacagatgaggggcgcgatccttgacacttgaggggcagagtgctgacagatgaggggcgcacctattgacatttgaggggctgtccacaggcagaaaatccagcatttgcaagggtttccgcccgtttttcggccaccgctaacctgtcttttaacctgcttttaaaccaatatttataaaccttgtttttaaccagggctgcgccctgtgcgcgtgaccgcgcacgccgaaggggggtgcccccccttctcgaaccctcccggtcgagtgagcgaggaagcaccagggaacagcacttatatattctgcttacacacgatgcctgaaaaaacttcccttggggttatccacttatccacggggatatttttataattattttttttatagtttttagatcttcttttttagagcgccttgtaggcctttatccatgctggttctagagaaggtgttgtgacaaattgccctttcagtgtgacaaatcaccctcaaatgacagtcctgtctgtgacaaattgcccttaaccctgtgacaaattgccctcagaagaagctgttttttcacaaagttatccctgcttattgactcttttttatttagtgtgacaatctaaaaacttgtcacacttcacatggatctgtcatggcggaaacagcggttatcaatcacaagaaacgtaaaaatagcccgcgaatcgtccagtcaaacgacctcactgaggcggcatatagtctctcccgggatcaaaaacgtatgctgtatctgttcgttgaccagatcagaaaatctgatggcaccctacaggaacatgacggtatctgcgagatccatgttgctaaatatgctgaaatattcggattgacctctgcggaagccagtaaggatatacggcaggcattgaagagtttcgcggggaaggaagtggttttttatcgccctgaagaggatgccggcgatgaaaaaggctatgaatcttttccttggtttatcaaacgtgcgcacagtccatccagagggctttacagtgtacatatcaacccatatctcattcccttctttatcgggttacagaaccggtttacgcagtttcggcttagtgaaacaaaagaaatcaccaatccgtatgccatgcgtttatacgaatccctgtgtcagtatcgtaagccggatggctcaggcatcgtctctctgaaaatcgactggatcatagagcgttaccagctgcctcaaagttaccagcgtatgcctgacttccgccgccgcttcctgcaggtctgtgttaatgagatcaacagcagaactccaatgcgcctctcatacattgagaaaaagaaaggccgccagacgactcatatcgtattttccttccgcgatatcacttccatgacgacaggatagtctgagggttatctgtcacagatttgagggtggttcgtcacatttgttctgacctactgagggtaatttgtcacagttttgctgtttccttcagcctgcatggattttctcatactttttgaactgtaatttttaaggaagccaaatttgagggcagtttgtcacagttgatttccttctctttcccttcgtcatgtgacctgatatcgggggttagttcgtcatcattgatgagggttgattatcacagtttattactctgaattggctatccgcgtgtgtacctctacctggagtttttcccacggtggatatttcttcttgcgctgagcgtaagagctatctgacagaacagttcttctttgcttcctcgccagttcgctcgctatgctcggttacacggctgcggcgagcgctagtgataataagtgactgaggtatgtgctcttcttatctccttttgtagtgttgctcttattttaaacaactttgcggttttttgatgactttgcgattttgttgttgctttgcagtaaattgcaagatttaataaaaaaacgcaaagcaatgattaaaggatgttcagaatgaaactcatggaaacacttaaccagtgcataaacgctggtcatgaaatgacgaaggctatcgccattgcacagtttaatgatgacagcccggaagcgaggaaaataacccggcgctggagaataggtgaagcagcggatttagttggggtttcttctcaggctatcagagatgccgagaaagcagggcgactaccgcacccggatatggaaattcgaggacgggttgagcaacgtgttggttatacaattgaacaaattaatcatatgcgtgatgtgtttggtacgcgattgcgacgtgctgaagacgtatttccaccggtgatcggggttgctgcccataaaggaggcgtttacaaaacctcagtttctgttcatcttgctcaggatctggctctgaaggggctacgtgttttgctcgtggaaggtaacgacccccagggaacagcctcaatgtatcacggatgggtaccagatcttcatattcatgcagaagacactctcctgcctttctatcttggggaaaaggacgatgtcacttatgcaataaagcccacttgctggccggggcttgacattattccttcctgtctggctctgcaccgtattgaaactgagttaatgggcaaatttgatgaaggtaaactgcccaccgatccacacctgatgctccgactggccattgaaactgttgctcatgactatgatgtcatagttattgacagcgcgcctaacctgggtatcggcacgattaatgtcgtatgtgctgctgatgtgctgattgttcccacgcctgctgagttgtttgactacacctccgcactgcagtttttcgatatgcttcgtgatctgctcaagaacgttgatcttaaagggttcgagcctgatgtacgtattttgcttaccaaatacagcaatagtaatggctctcagtccccgtggatggaggagcaaattcgggatgcctggggaagcatggttctaaaaaatgttgtacgtgaaacggatgaagttggtaaaggtcagatccggatgagaactgtttttgaacaggccattgatcaacgctcttcaactggtgcctggagaaatgctctttctatttgggaacctgtctgcaatgaaattttcgatcgtctgattaaaccacgctgggagattagataatgaagcgtgcgcctgttattccaaaacatacgctcaatactcaaccggttgaagatacttcgttatcgacaccagctgccccgatggtggattcgttaattgcgcgcgtaggagtaatggctcgcggtaatgccattactttgcctgtatgtggtcgggatgtgaagtttactcttgaagtgctccggggtgatagtgttgagaagacctctcgggtatggtcaggtaatgaacgtgaccaggagctgcttactgaggacgcactggatgatctcatcccttcttttctactgactggtcaacagacaccggcgttcggtcgaagagtatctggtgtcatagaaattgccgatgggagtcgccgtcgtaaagctgctgcacttaccgaaagtgattatcgtgttctggttggcgagctggatgatgagcagatggctgcattatccagattgggtaacgattatcgcccaacaagtgcttatgaacgtggtcagcgttatgcaagccgattgcagaatgaatttgctggaaatatttctgcgctggctgatgcggaaaatatttcacgtaagattattacccgctgtatcaacaccgccaaattgcctaaatcagttgttgctcttttttctcaccccggtgaactatctgcccggtcaggtgatgcacttcaaaaagcctttacagataaagaggaattacttaagcagcaggcatctaaccttcatgagcagaaaaaagctggggtgatatttgaagctgaagaagttatcactcttttaacttctgtgcttaaaacgtcatctgcatcaagaactagtttaagctcacgacatcagtttgctcctggagcgacagtattgtataagggcgataaaatggtgcttaacctggacaggtctcgtgttccaactgagtgtatagagaaaattgaggccattcttaaggaacttgaaaagccagcaccctgatgcgaccacgttttagtctacgtttatctgtctttacttaatgtcctttgttacaggccagaaagcataactggcctgaatattctctctgggcccactgttccacttgtatcgtcggtctgataatcagactgggaccacggtcccactcgtatcgtcggtctgattattagtctgggaccacggtcccactcgtatcgtcggtctgattattagtctgggaccacggtcccactcgtatcgtcggtctgataatcagactgggaccacggtcccactcgtatcgtcggtctgattattagtctgggaccatggtcccactcgtatcgtcggtctgattattagtctgggaccacggtcccactcgtatcgtcggtctgattattagtctggaaccacggtcccactcgtatcgtcggtctgattattagtctgggaccacggtcccactcgtatcgtcggtctgattattagtctgggaccacgatcccactcgtgttgtcggtctgattatcggtctgggaccacggtcccacttgtattgtcgatcagactatcagcgtgagactacgattccatcaatgcctgtcaagggcaagtattgacatggtcgtcgtaacctgtagaacggagtaacctcggtgtgcggttgtatgcctgctgtggattgctgctgtgtcctgcttatccacaacattttgcgcacggttatgtggacaaaatacctggttacccaggccgtgccggcacgttaaccgggctgcatccgatgcaagtgtgtcgctgtcgacgagctcgcgagctcggacatgaggttgccccgtattcagtgtcgctgatttgtattgtctgaagttgcttttacgttaagttgatgcagatcaattaatacgatacctgcgtcataattgattatttgacgtggtttgatggcctccacgcacgttgtgatatgtagatgataatcattatcactttacgggtcctttccggtgatccgacaggttacggggcggcgacctcgcgggttttcgctatttatgaaaattttccggtttaaggcgtttccgttcttcttcgtcataacttaatgtttttatttaaaataccctctgaaaagaaaggaaacgacaggtgctgaaagcgagctttttggcctctgtcgtttcctttctctgtttttgtccgtggaatgaacaatggaagtccgagctcatcgctaataacttcgtatagcatacattatacgaagttatattcgatgcggccgatctagcagaaagtcaaaagcctccgaccggaggcttttgacttctgtcacctaggttacgccccgccctgccactcatcgcagtactgttgtaattcattaagcattctgccgacatggaagccatcacaaacggcatgatgaacctgaatcgccagcggcatcagcaccttgtcgccttgcgtataatatttgcccatggtgaaaacgggggcgaagaagttgtccatattggccacgtttaaatcaaaactggtgaaactcacccagggattggctgagacgaaaaacatattctcaataaaccctttagggaaataggccaggttttcaccgtaacacgccacatcttgcgaatatatgtgtagaaactgccggaaatcgtcgtggtattcactccagagcgatgaaaacgtttcagtttgctcatggaaaacggtgtaacaagggtgaacactatcccatatcaccagctcaccgtctttcattgccatacgaaattccggatgagcattcatcaggcgggcaagaatgtgaataaaggccggataaaacttgtgcttatttttctttacggtctttaaaaaggccgtaatatccagctgaacggtctggttataggtacattgagcaactgactgaaatgcctcaaaatgttctttacgatgccattgggatatatcaacggtggtatatccagtgatttttttctccattttagcttccttagctcctgaaaatctcgataactcaaaaaatacgcccggtagtgatcttatttcattatggtgaaagttggaacctcttacgtgccgatcagattaaaacgaaaggcccagtctttcgactgagcctttcgttttatttgaccatgttggtatgatttcgcatcagattggctattggccattgcatacgttgtatccatatcataatatgtacatttatattggctcatgtccaacattaccgccatgttgacattgattattgactagttattaatagtaatcaattacggggtcattagttcatagcccatatatggagttccgcgttacataacttacggtaaatggcccgcctggctgaccgcccaacgacccccgcccattgacgtcaataatgacgtatgttcccatagtaacgccaatagggactttccattgacgtcaatgggtggagtatttacggtaaactgcccacttggcagtacatcaagtgtatcatatgccaagtacgccccctattgacgtcaatgacggtaaatggcccgcctggcattatgcccagtacatgaccttatgggactttcctacttggcagtacatctacgtattagtcatcgctattaccatggtgatgcggttttggcagtacatcaatgggcgtggatagcggtttgactcacggggatttccaagtctccaccccattgacgtcaatgggagtttgttttggcaccaaaatcaacgggactttccaaaatgtcgtaacaactccgccccattgacgcaaatgggcggtaggcgtgtacggtgggaggtctatataagcagagctcgtttagtgaaccgtcagatcgcctggagacgccatccacgctgttttgacctccatagaagacaccgggaccgatccagcctccgcggccgggaacggtgcattggaacgcggattccccgtgccaagagtgacgtaagtacaaattcagt

SEQ ID NO: 7 - DNA, 26597 bp, Artificial Sequence
  T7GG-scv2-nanoluc replicon
taatacgactcactataggattaaaggtttataccttcccaggtaacaaaccaaccaactttcgatctcttgtagatctgttctctaaacgaactttaaaatctgtgtggctgtcactcggctgcatgcttagtgcactcacgcagtataattaataactaattactgtcgttgacaggacacgagtaactcgtctatcttctgcaggctgcttacggtttcgtccgtgttgcagccgatcatcagcacatctaggtttcgtccgggtgtgaccgaaaggtaagatggagagccttgtccctggtttcaacgagaaaacacacgtccaactcagtttgcctgttttacaggttcgcgacgtgctcgtacgtggctttggagactccgtggaggaggtcttatcagaggcacgtcaacatcttaaagatggcacttgtggcttagtagaagttgaaaaaggcgttttgcctcaacttgaacagccctatgtgttcatcaaacgttcggatgctcgaactgcacctcatggtcatgttatggttgagctggtagcagaactcgaaggcattcagtacggtcgtagtggtgagacacttggtgtccttgtccctcatgtgggcgaaataccagtggcttaccgcaaggttcttcttcgtaagaacggtaataaaggagctggtggccatagttacggcgccgatctaaagtcatttgacttaggcgacgagcttggcactgatccttatgaagattttcaagaaaactggaacactaaacatagcagtggtgttacccgtgaactcatgcgtgagcttaacggaggggcatacactcgctatgtcgataacaacttctgtggccctgatggctaccctcttgagtgcattaaagaccttctagcacgtgctggtaaagcttcatgcactttgtccgaacaactggactttattgacactaagaggggtgtatactgctgccgtgaacatgagcatgaaattgcttggtacacggaacgttctgaaaagagctatgaattgcagacaccttttgaaattaaattggcaaagaaatttgacaccttcaatggggaatgtccaaattttgtatttcccttaaattccataatcaagactattcaaccaagggttgaaaagaaaaagcttgatggctttatgggtagaattcgatctgtctatccagttgcgtcaccaaatgaatgcaaccaaatgtgcctttcaactctcatgaagtgtgatcattgtggtgaaacttcatggcagacgggcgattttgttaaagccacttgcgaattttgtggcactgagaatttgactaaagaaggtgccactacttgtggttacttaccccaaaatgctgttgttaaaatttattgtccagcatgtcacaattcagaagtaggacctgagcatagtcttgccgaataccataatgaatctggcttgaaaaccattcttcgtaagggtggtcgcactattgcctttggaggctgtgtgttctcttatgttggttgccataacaagtgtgcctattgggttccacgtgctagcgctaacataggttgtaaccatacaggtgttgttggagaaggttccgaaggtcttaatgacaaccttcttgaaatactccaaaaagagaaagtcaacatcaatattgttggtgactttaaacttaatgaagagatcgccattattttggcatctttttctgcttccacaagtgcttttgtggaaactgtgaaaggtttggattataaagcattcaaacaaattgttgaatcctgtggtaattttaaagttacaaaaggaaaagctaaaaaaggtgcctggaatattggtgaacagaaatcaatactgagtcctctttatgcatttgcatcagaggctgctcgtgttgtacgatcaattttctcccgcactcttgaaactgctcaaaattctgtgcgtgttttacagaaggccgctataacaatactagatggaatttcacagtattcactgagactcattgatgctatgatgttcacatctgatttggctactaacaatctagttgtaatggcctacattacaggtggtgttgttcagttgacttcgcagtggctaactaacatctttggcactgtttatgaaaaactcaaacccgtccttgattggcttgaagagaagtttaaggaaggtgtagagtttcttagagacggttgggaaattgttaaatttatctcaacctgtgcttgtgaaattgtcggtggacaaattgtcacctgtgcaaaggaaattaaggagagtgttcagacattctttaagcttgtaaataaatttttggctttgtgtgctgactctatcattattggtggagctaaacttaaagccttgaatttaggtgaaacatttgtcacgcactcaaagggattgtacagaaagtgtgttaaatccagagaagaaactggcctactcatgcctctaaaagccccaaaagaaattatcttcttagagggagaaacacttcccacagaagtgttaacagaggaagttgtcttgaaaactggtgatttacaaccattagaacaacctactagtgaagctgttgaagctccattggttggtacaccagtttgtattaacgggcttatgttgctcgaaatcaaagacacagaaaagtactgtgcccttgcacctaatatgatggtaacaaacaataccttcacactcaaaggcggtgcaccaacaaaggttacttttggtgatgacactgtgatagaagtgcaaggttacaagagtgtgaatatcacttttgaacttgatgaaaggattgataaagtacttaatgagaagtgctctgcctatacagttgaactcggtacagaagtaaatgagttcgcctgtgttgtggcagatgctgtcataaaaactttgcaaccagtatctgaattacttacaccactgggcattgatttagatgagtggagtatggctacatactacttatttgatgagtctggtgagtttaaattggcttcacatatgtattgttctttctaccctccagatgaggatgaagaagaaggtgattgtgaagaagaagagtttgagccatcaactcaatatgagtatggtactgaagatgattaccaaggtaaacctttggaatttggtgccacttctgctgctcttcaacctgaagaagagcaagaagaagattggttagatgatgatagtcaacaaactgttggtcaacaagacggcagtgaggacaatcagacaactactattcaaacaattgttgaggttcaacctcaattagagatggaacttacaccagttgttcagactattgaagtgaatagttttagtggttatttaaaacttactgacaatgtatacattaaaaatgcagacattgtggaagaagctaaaaaggtaaaaccaacagtggttgttaatgcagccaatgtttaccttaaacatggaggaggtgttgcaggagccttaaataaggctactaacaatgccatgcaagttgaatctgatgattacatagctactaatggaccacttaaagtgggtggtagttgtgttttaagcggacacaatcttgctaaacactgtcttcatgttgtcggcccaaatgttaacaaaggtgaagacattcaacttcttaagagtgcttatgaaaattttaatcagcacgaagttctacttgcaccattattatcagctggtatttttggtgctgaccctatacattctttaagagtttgtgtagatactgttcgcacaaatgtctacttagctgtctttgataaaaatctctatgacaaacttgtttcaagctttttggaaatgaagagtgaaaagcaagttgaacaaaagatcgctgagattcctaaagaggaagttaagccatttataactgaaagtaaaccttcagttgaacagagaaaacaagatgataagaaaatcaaagcttgtgttgaagaagttacaacaactctggaagaaactaagttcctcacagaaaacttgttactttatattgacattaatggcaatcttcatccagattctgccactcttgttagtgacattgacatcactttcttaaagaaagatgctccatatatagtgggtgatgttgttcaagagggtgttttaactgctgtggttatacctactaaaaaggctggtggcactactgaaatgctagcgaaagctttgagaaaagtgccaacagacaattatataaccacttacccgggtcagggtttaaatggttacactgtagaggaggcaaagacagtgcttaaaaagtgtaaaagtgccttttacattctaccatctattatctctaatgagaagcaagaaattcttggaactgtttcttggaatttgcgagaaatgcttgcacatgcagaagaaacacgcaaattaatgcctgtctgtgtggaaactaaagccatagtttcaactatacagcgtaaatataagggtattaaaatacaagagggtgtggttgattatggtgctagattttacttttacaccagtaaaacaactgtagcgtcacttatcaacacacttaacgatctaaatgaaactcttgttacaatgccacttggctatgtaacacatggcttaaatttggaagaagctgctcggtatatgagatctctcaaagtgccagctacagtttctgtttcttcacctgatgctgttacagcgtataatggttatcttacttcttcttctaaaacacctgaagaacattttattgaaaccatctcacttgctggttcctataaagattggtcctattctggacaatctacacaactaggtatagaatttcttaagagaggtgataaaagtgtatattacactagtaatcctaccacattccacctagatggtgaagttatcacctttgacaatcttaagacacttctttctttgagagaagtgaggactattaaggtgtttacaacagtagacaacattaacctccacacgcaagttgtggacatgtcaatgacatatggacaacagtttggtccaacttatttggatggagctgatgttactaaaataaaacctcataattcacatgaaggtaaaacattttatgttttacctaatgatgacactctacgtgttgaggcttttgagtactaccacacaactgatcctagttttctgggtaggtacatgtcagcattaaatcacactaaaaagtggaaatacccacaagttaatggtttaacttctattaaatgggcagataacaactgttatcttgccactgcattgttaacactccaacaaatagagttgaagtttaatccacctgctctacaagatgcttattacagagcaagggctggtgaagctgctaacttttgtgcacttatcttagcctactgtaataagacagtaggtgagttaggtgatgttagagaaacaatgagttacttgtttcaacatgccaatttagattcttgcaaaagagtcttgaacgtggtgtgtaaaacttgtggacaacagcagacaacccttaagggtgtagaagctgttatgtacatgggcacactttcttatgaacaatttaagaaaggtgttcagataccttgtacgtgtggtaaacaagctacaaaatatctagtacaacaggagtcaccttttgttatgatgtcagcaccacctgctcagtatgaacttaagcatggtacatttacttgtgctagtgagtacactggtaattaccagtgtggtcactataaacatataacttctaaagaaactttgtattgcatagacggtgctttacttacaaagtcctcagaatacaaaggtcctattacggatgttttctacaaagaaaacagttacacaacaaccataaaaccagttacttataaattggatggtgttgtttgtacagaaattgaccctaagttggacaattattataagaaagacaattcttatttcacagagcaaccaattgatcttgtaccaaaccaaccatatccaaacgcaagcttcgataattttaagtttgtatgtgataatatcaaatttgctgatgatttaaaccagttaactggttataagaaacctgcttcaagagagcttaaagttacatttttccctgacttaaatggtgatgtggtggctattgattataaacactacacaccctcttttaagaaaggagctaaattgttacataaacctattgtttggcatgttaacaatgcaactaataaagccacgtataaaccaaatacctggtgtatacgttgtctttggagcacaaaaccagttgaaacatcaaattcgtttgatgtactgaagtcagaggacgcgcagggaatggataatcttgcctgcgaagatctaaaaccagtctctgaagaagtagtggaaaatcctaccatacagaaagacgttcttgagtgtaatgtgaaaactaccgaagttgtaggagacattatacttaaaccagcaaataatagtttaaaaattacagaagaggttggccacacagatctaatggctgcttatgtagacaattctagtcttactattaagaaacctaatgaattatctagagtattaggtttgaaaacccttgctactcatggtttagctgctgttaatagtgtcccttgggatactatagctaattatgctaagccttttcttaacaaagttgttagtacaactactaacatagttacacggtgtttaaaccgtgtttgtactaattatatgccttatttctttactttattgctacaattgtgtacttttactagaagtacaaattctagaattaaagcatctatgccgactactatagcaaagaatactgttaagagtgtcggtaaattttgtctagaggcttcatttaattatttgaagtcacctaatttttctaaactgataaatattataatttggtttttactattaagtgtttgcctaggttctttaatctactcaaccgctgctttaggtgttttaatgtctaatttaggcatgccttcttactgtactggttacagagaaggctatttgaactctactaatgtcactattgcaacctactgtactggttctataccttgtagtgtttgtcttagtggtttagattctttagacacctatccttctttagaaactatacaaattaccatttcatcttttaaatgggatttaactgcttttggcttagttgcagagtggtttttggcatatattcttttcactaggtttttctatgtacttggattggctgcaatcatgcaattgtttttcagctattttgcagtacattttattagtaattcttggcttatgtggttaataattaatcttgtacaaatggccccgatttcagctatggttagaatgtacatcttctttgcatcattttattatgtatggaaaagttatgtgcatgttgtagacggttgtaattcatcaacttgtatgatgtgttacaaacgtaatagagcaacaagagtcgaatgtacaactattgttaatggtgttagaaggtccttttatgtctatgctaatggaggtaaaggcttttgcaaactacacaattggaattgtgttaattgtgatacattctgtgctggtagtacatttattagtgatgaagttgcgagagacttgtcactacagtttaaaagaccaataaatcctactgaccagtcttcttacatcgttgatagtgttacagtgaagaatggttccatccatctttactttgataaagctggtcaaaagacttatgaaagacattctctctctcattttgttaacttagacaacctgagagctaataacactaaaggttcattgcctattaatgttatagtttttgatggtaaatcaaaatgtgaagaatcatctgcaaaatcagcgtctgtttactacagtcagcttatgtgtcaacctatactgttactagatcaggcattagtgtctgatgttggtgatagtgcggaagttgcagttaaaatgtttgatgcttacgttaatacgttttcatcaacttttaacgtaccaatggaaaaactcaaaacactagttgcaactgcagaagctgaacttgcaaagaatgtgtccttagacaatgtcttatctacttttatttcagcagctcggcaagggtttgttgattcagatgtagaaactaaagatgttgttgaatgtcttaaattgtcacatcaatctgacatagaagttactggcgatagttgtaataactatatgctcacctataacaaagttgaaaacatgacaccccgtgaccttggtgcttgtattgactgtagtgcgcgtcatattaatgcgcaggtagcaaaaagtcacaacattgctttgatatggaacgttaaagatttcatgtcattgtctgaacaactacgaaaacaaatacgtagtgctgctaaaaagaataacttaccttttaagttgacatgtgcaactactagacaagttgttaatgttgtaacaacaaagatagcacttaagggtggtaaaattgttaataattggttgaagcagttaattaaagttacacttgtgttcctttttgttgctgctattttctatttaataacacctgttcatgtcatgtctaaacatactgacttttcaagtgaaatcataggatacaaggctattgatggtggtgtcactcgtgacatagcatctacagatacttgttttgctaacaaacatgctgattttgacacatggtttagccagcgtggtggtagttatactaatgacaaagcttgcccattgattgctgcagtcataacaagagaagtgggttttgtcgtgcctggtttgcctggcacgatattacgcacaactaatggtgactttttgcatttcttacctagagtttttagtgcagttggtaacatctgttacacaccatcaaaacttatagagtacactgactttgcaacatcagcttgtgttttggctgctgaatgtacaatttttaaagatgcttctggtaagccagtaccatattgttatgataccaatgtactagaaggttctgttgcttatgaaagtttacgccctgacacacgttatgtgctcatggatggctctattattcaatttcctaacacctaccttgaaggttctgttagagtggtaacaacttttgattctgagtactgtaggcacggcacttgtgaaagatcagaagctggtgtttgtgtatctactagtggtagatgggtacttaacaatgattattacagatctttaccaggagttttctgtggtgtagatgctgtaaatttacttactaatatgtttacaccactaattcaacctattggtgctttggacatatcagcatctatagtagctggtggtattgtagctatcgtagtaacatgccttgcctactattttatgaggtttagaagagcttttggtgaatacagtcatgtagttgcctttaatactttactattccttatgtcattcactgtactctgtttaacaccagtttactcattcttacctggtgtttattctgttatttacttgtacttgacattttatcttactaatgatgtttcttttttagcacatattcagtggatggttatgttcacacctttagtacctttctggataacaattgcttatatcatttgtatttccacaaagcatttctattggttctttagtaattacctaaagagacgtgtagtctttaatggtgtttcctttagtacttttgaagaagctgcgctgtgcacctttttgttaaataaagaaatgtatctaaagttgcgtagtgatgtgctattacctcttacgcaatataatagatacttagctctttataataagtacaagtattttagtggagcaatggatacaactagctacagagaagctgcttgttgtcatctcgcaaaggctctcaatgacttcagtaactcaggttctgatgttctttaccaaccaccacaaacctctatcacctcagctgttttgcagagtggttttagaaaaatggcattcccatctggtaaagttgagggttgtatggtacaagtaacttgtggtacaactacacttaacggtctttggcttgatgacgtagtttactgtccaagacatgtgatctgcacctctgaagacatgcttaaccctaattatgaagatttactcattcgtaagtctaatcataatttcttggtacaggctggtaatgttcaactcagggttattggacattctatgcaaaattgtgtacttaagcttaaggttgatacagccaatcctaagacacctaagtataagtttgttcgcattcaaccaggacagactttttcagtgttagcttgttacaatggttcaccatctggtgtttaccaatgtgctatgaggcccaatttcactattaagggttcattccttaatggttcatgtggtagtgttggttttaacatagattatgactgtgtctctttttgttacatgcaccatatggaattaccaactggagttcatgctggcacagacttagaaggtaacttttatggaccttttgttgacaggcaaacagcacaagcagctggtacggacacaactattacagttaatgttttagcttggttgtacgctgctgttataaatggagacaggtggtttctcaatcgatttaccacaactcttaatgactttaaccttgtggctatgaagtacaattatgaacctctaacacaagaccatgttgacatactaggacctctttctgctcaaactggaattgccgttttagatatgtgtgcttcattaaaagaattactgcaaaatggtatgaatggacgtaccatattgggtagtgctttattagaagatgaatttacaccttttgatgttgttagacaatgctcaggtgttactttccaaagtgcagtgaaaagaacaatcaagggtacacaccactggttgttactcacaattttgacttcacttttagttttagtccagagtactcaatggtctttgttcttttttttgtatgaaaatgcctttttaccttttgctatgggtattattgctatgtctgcttttgcaatgatgtttgtcaaacataagcatgcatttctctgtttgtttttgttaccttctcttgccactgtagcttattttaatatggtctatatgcctgctagttgggtgatgcgtattatgacatggttggatatggttgatactagtttgtctggttttaagctaaaagactgtgttatgtatgcatcagctgtagtgttactaatccttatgacagcaagaactgtgtatgatgatggtgctaggagagtgtggacacttatgaatgtcttgacactcgtttataaagtttattatggtaatgctttagatcaagccatttccatgtgggctcttataatctctgttacttctaactactcaggtgtagttacaactgtcatgtttttggccagaggtattgtttttatgtgtgttgagtattgccctattttcttcataactggtaatacacttcagtgtataatgctagtttattgtttcttaggctatttttgtacttgttactttggcctcttttgtttactcaaccgctactttagactgactcttggtgtttatgattacttagtttctacacaggagtttagatatatgaattcacagggactactcccacccaagaatagcatagatgccttcaaactcaacattaaattgttgggtgttggtggcaaaccttgtatcaaagtagccactgtacagtctaaaatgtcagatgtaaagtgcacatcagtagtcttactctcagttttgcaacaactcagagtagaatcatcatctaaattgtgggctcaatgtgtccagttacacaatgacattctcttagctaaagatactactgaagcctttgaaaaaatggtttcactactttctgttttgctttccatgcagggtgctgtagacataaacaagctttgtgaagaaatgctggacaacagggcaaccttacaagctatagcctcagagtttagttcccttccatcatatgcagcttttgctactgctcaagaagcttatgagcaggctgttgctaatggtgattctgaagttgttcttaaaaagttgaagaagtctttgaatgtggctaaatctgaatttgaccgtgatgcagccatgcaacgtaagttggaaaagatggctgatcaagctatgacccaaatgtataaacaggctagatctgaggacaagagggcaaaagttactagtgctatgcagacaatgcttttcactatgcttagaaagttggataatgatgcactcaacaacattatcaacaatgcaagagatggttgtgttcccttgaacataatacctcttacaacagcagccaaactaatggttgtcataccagactataacacatataaaaatacgtgtgatggtacaacatttacttatgcatcagcattgtgggaaatccaacaggttgtagatgcagatagtaaaattgttcaacttagtgaaattagtatggacaattcacctaatttagcatggcctcttattgtaacagctttaagggccaattctgctgtcaaattacagaataatgagcttagtcctgttgcactacgacagatgtcttgtgctgccggtactacacaaactgcttgcactgatgacaatgcgttagcttactacaacacaacaaagggaggtaggtttgtacttgcactgttatccgatttacaggatttgaaatgggctagattccctaagagtgatggaactggtactatctatacagaactggaaccaccttgtaggtttgttacagacacacctaaaggtcctaaagtgaagtatttatactttattaaaggattaaacaacctaaatagaggtatggtacttggtagtttagctgccacagtacgtctacaagctggtaatgcaacagaagtgcctgccaattcaactgtattatctttctgtgcttttgctgtagatgctgctaaagcttacaaagattatctagctagtgggggacaaccaatcactaattgtgttaagatgttgtgtacacacactggtactggtcaggcaataacagttacaccggaagccaatatggatcaagaatcctttggtggtgcatcgtgttgtctgtactgccgttgccacatagatcatccaaatcctaaaggattttgtgacttaaaaggtaagtatgtacaaatacctacaacttgtgctaatgaccctgtgggttttacacttaaaaacacagtctgtaccgtctgcggtatgtggaaaggttatggctgtagttgtgatcaactccgcgaacccatgcttcagtcagctgatgcacaatcgtttttaaacgggtttgcggtgtaagtgcagcccgtcttacaccgtgcggcacaggcactagtactgatgtcgtatacagggcttttgacatctacaatgataaagtagctggttttgctaaattcctaaaaactaattgttgtcgcttccaagaaaaggacgaagatgacaatttaattgattcttactttgtagttaagagacacactttctctaactaccaacatgaagaaacaatttataatttacttaaggattgtccagctgttgctaaacatgacttctttaagtttagaatagacggtgacatggtaccacatatatcacgtcaacgtcttactaaatacacaatggcagacctcgtctatgctttaaggcattttgatgaaggtaattgtgacacattaaaagaaatacttgtcacatacaattgttgtgatgatgattatttcaataaaaaggactggtatgattttgtagaaaacccagatatattacgcgtatacgccaacttaggtgaacgtgtacgccaagctttgttaaaaacagtacaattctgtgatgccatgcgaaatgctggtattgttggtgtactgacattagataatcaagatctcaatggtaactggtatgatttcggtgatttcatacaaaccacgccaggtagtggagttcctgttgtagattcttattattcattgttaatgcctatattaaccttgaccagggctttaactgcagagtcacatgttgacactgacttaacaaagccttacattaagtgggatttgttaaaatatgacttcacggaagagaggttaaaactctttgaccgttattttaaatattgggatcagacataccacccaaattgtgttaactgtttggatgacagatgcattctgcattgtgcaaactttaatgttttattctctacagtgttcccacctacaagttttggaccactagtgagaaaaatatttgttgatggtgttccatttgtagtttcaactggataccacttcagagagctaggtgttgtacataatcaggatgtaaacttacatagctctagacttagttttaaggaattacttgtgtatgctgctgaccctgctatgcacgctgcttctggtaatctattactagataaacgcactacgtgcttttcagtagctgcacttactaacaatgttgcttttcaaactgtcaaacccggtaattttaacaaagacttctatgactttgctgtgtctaagggtttctttaaggaaggaagttctgttgaattaaaacacttcttctttgctcaggatggtaatgctgctatcagcgattatgactactatcgttataatctaccaacaatgtgtgatatcagacaactactatttgtagttgaagttgttgataagtactttgattgttacgatggtggctgtattaatgctaaccaagtcatcgtcaacaacctagacaaatcagctggttttccatttaataaatggggtaaggctagactttattatgattcaatgagttatgaggatcaagatgcacttttcgcatatacaaaacgtaatgtcatccctactataactcaaatgaatcttaagtatgccattagtgcaaagaatagagctcgcaccgtagctggtgtctctatctgtagtactatgaccaatagacagtttcatcaaaaattattgaaatcaatagccgccactagaggagctactgtagtaattggaacaagcaaattctatggtggttggcacaacatgttaaaaactgtttatagtgatgtagaaaaccctcaccttatgggttgggattatcctaaatgtgatagagccatgcctaacatgcttagaattatggcctcacttgttcttgctcgcaaacatacaacgtgttgtagcttgtcacaccgtttctatagattagctaatgagtgtgctcaagtattgagtgaaatggtcatgtgtggcggttcactatatgttaaaccaggtggaacctcatcaggagatgccacaactgcttatgctaatagtgtttttaacatttgtcaagctgtcacggccaatgttaatgcacttttatctactgatggtaacaaaattgccgataagtatgtccgcaatttacaacacagactttatgagtgtctctatagaaatagagatgttgacacagactttgtgaatgagttttacgcatatttgcgtaaacatttctcaatgatgatactctctgacgatgctgttgtgtgtttcaatagcacttatgcatctcaaggtctagtggctagcataaagaactttaagtcagttctttattatcaaaacaatgtttttatgtctgaagcaaaatgttggactgagactgaccttactaaaggacctcatgaattttgctctcaacatacaatgctagttaaacagggtgatgattatgtgtaccttccttacccagatccatcaagaatcctaggggccggctgttttgtagatgatatcgtaaaaacagatggtacacttatgattgaacggttcgtgtctttagctatagatgcttacccacttactaaacatcctaatcaggagtatgctgatgtctttcatttgtacttacaatacataagaaagctacatgatgagttaacaggacacatgttagacatgtattctgttatgcttactaatgataacacttcaaggtattgggaacctgagttttatgaggctatgtacacaccgcatacagtcttacaggctgttggggcttgtgttctttgcaattcacagacttcattaagatgtggtgcttgcatacgtagaccattcttatgttgtaaatgctgttacgaccatgtcatatcaacatcacataaattagtcttgtctgttaatccgtatgtttgcaatgctccaggttgtgatgtcacagatgtgactcaactttacttaggaggtatgagctattattgtaaatcacataaaccacccattagttttccattgtgtgctaatggacaagtttttggtttatataaaaatacatgtgttggtagcgataatgttactgactttaatgcaattgcaacatgtgactggacaaatgctggtgattacattttagctaacacctgtactgaaagactcaagctttttgcagcagaaacgctcaaagctactgaggagacatttaaactgtcttatggtattgctactgtacgtgaagtgctgtctgacagagaattacatctttcatgggaagttggtaaacctagaccaccacttaaccgaaattatgtctttactggttatcgtgtaactaaaaacagtaaagtacaaataggagagtacacctttgaaaaaggtgactatggtgatgctgttgtttaccgaggtacaacaacttacaaattaaatgttggtgattattttgtgctgacatcacatacagtaatgccattaagtgcacctacactagtgccacaagagcactatgttagaattactggcttatacccaacactcaatatctcagatgagttttctagcaatgttgcaaattatcaaaaggttggtatgcaaaagtattctacactccagggaccacctggtactggtaagagtcattttgctattggcctagctctctactacccttctgctcgcatagtgtatacagcttgctctcatgccgctgttgatgcactatgtgagaaggcattaaaatatttgcctatagataaatgtagtagaattatacctgcacgtgctcgtgtagagtgttttgataaattcaaagtgaattcaacattagaacagtatgtcttttgtactgtaaatgcattgcctgagacgacagcagatatagttgtctttgatgaaatttcaatggccacaaattatgatttgagtgttgtcaatgccagattacgtgctaagcactatgtgtacattggcgaccctgctcaattacctgcaccacgcacattgctaactaagggcacactagaaccagaatatttcaattcagtgtgtagacttatgaaaactataggtccagacatgttcctcggaacttgtcggcgttgtcctgctgaaattgttgacactgtgagtgctttggtttatgataataagcttaaagcacataaagacaaatcagctcaatgctttaaaatgttttataagggtgttatcacgcatgatgtttcatctgcaattaacaggccacaaataggcgtggtaagagaattccttacacgtaaccctgcttggagaaaagctgtctttatttcaccttataattcacagaatgctgtagcctcaaagattttgggactaccaactcaaactgttgattcatcacagggctcagaatatgactatgtcatattcactcaaaccactgaaacagctcactcttgtaatgtaaacagatttaatgttgctattaccagagcaaaagtaggcatactttgcataatgtctgatagagacctttatgacaagttgcaatttacaagtcttgaaattccacgtaggaatgtggcaactttacaagctgaaaatgtaacaggactctttaaagattgtagtaaggtaatcactgggttacatcctacacaggcacctacacacctcagtgttgacactaaattcaaaactgaaggtttatgtgttgacatacctggcatacctaaggacatgacctatagaagactcatctctatgatgggttttaaaatgaattatcaagttaatggttaccctaacatgtttatcacccgcgaagaagctataagacatgtacgtgcatggattggcttcgatgtcgaggggtgtcatgctactagagaagctgttggtaccaatttacctttacagctaggtttttctacaggtgttaacctagttgctgtacctacaggttatgttgatacacctaataatacagatttttccagagttagtgctaaaccaccgcctggagatcaatttaaacacctcataccacttatgtacaaaggacttccttggaatgtagtgcgtataaagattgtacaaatgttaagtgacacacttaaaaatctctctgacagagtcgtatttgtcttatgggcacatggctttgagttgacatctatgaagtattttgtgaaaataggacctgagcgcacctgttgtctatgtgatagacgtgccacatgcttttccactgcttcagacacttatgcctgttggcatcattctattggatttgattacgtctataatccgtttatgattgatgttcaacaatggggttttacaggtaacctacaaagcaaccatgatctgtattgtcaagtccatggtaatgcacatgtagctagttgtgatgcaatcatgactaggtgtctagctgtccacgagtgctttgttaagcgtgttgactggactattgaatatcctataattggtgatgaactgaagattaatgcggcttgtagaaaggttcaacacatggttgttaaagctgcattattagcagacaaattcccagttcttcacgacattggtaaccctaaagctattaagtgtgtacctcaagctgatgtagaatggaagttctatgatgcacagccttgtagtgacaaagcttataaaatagaagaattattctattcttatgccacacattctgacaaattcacagatggtgtatgcctattttggaattgcaatgtcgatagatatcctgctaattccattgtttgtagatttgacactagagtgctatctaaccttaacttgcctggttgtgatggtggcagtttgtatgtaaataaacatgcattccacacaccagcttttgataaaagtgcttttgttaatttaaaacaattaccatttttctattactctgacagtccatgtgagtctcatggaaaacaagtagtgtcagatatagattatgtaccactaaagtctgctacgtgtataacacgttgcaatttaggtggtgctgtctgtagacatcatgctaatgagtacagattgtatctcgatgcttataacatgatgatctcagctggctttagcttgtgggtttacaaacaatttgatacttataacctctggaacacttttacaagacttcagagtttagaaaatgtggcttttaatgttgtaaataagggacactttgatggacaacagggtgaagtaccagtttctatcattaataacactgtttacacaaaagttgatggtgttgatgtagaattgtttgaaaataaaacaacattacctgttaatgtagcatttgagctttgggctaagcgcaacattaaaccagtaccagaggtgaaaatactcaataatttgggtgtggacattgctgctaatactgtgatctgggactacaaaagagatgctccagcacatatatctactattggtgtttgttctatgactgacatagccaagaaaccaactgaaacgatttgtgcaccactcactgtcttttttgatggtagagttgatggtcaagtagacttatttagaaatgcccgtaatggtgttcttattacagaaggtagtgttaaaggtttacaaccatctgtaggtcccaaacaagctagtcttaatggagtcacattaattggagaagccgtaaaaacacagttcaattattataagaaagttgatggtgttgtccaacaattacctgaaacttactttactcagagtagaaatttacaagaatttaaacccaggagtcaaatggaaattgatttcttagaattagctatggatgaattcattgaacggtataaattagaaggctatgccttcgaacatatcgtttatggagattttagtcatagtcagttaggtggtttacatctactgattggactagctaaacgttttaaggaatcaccttttgaattagaagattttattcctatggacagtacagttaaaaactatttcataacagatgcgcaaacaggttcatctaagtgtgtgtgttctgttattgatttattacttgatgattttgttgaaataataaaatcccaagatttatctgtagtttctaaggttgtcaaagtgactattgactatacagaaatttcatttatgctttggtgtaaagatggccatgtagaaacattttacccaaaattacaatctagtcaagcgtggcaaccgggtgttgctatgcctaatctttacaaaatgcaaagaatgctattagaaaagtgtgaccttcaaaattatggtgatagtgcaacattacctaaaggcataatgatgaatgtcgcaaaatatactcaactgtgtcaatatttaaacacattaacattagctgtaccctataatatgagagttatacattttggtgctggttctgataaaggagttgcaccaggtacagctgttttaagacagtggttgcctacgggtacgctgcttgtcgattcagatcttaatgactttgtctctgatgcagattcaactttgattggtgattgtgcaactgtacatacagctaataaatgggatctcattattagtgatatgtacgaccctaagactaaaaatgttacaaaagaaaatgactctaaagagggttttttcacttacatttgtgggtttatacaacaaaagctagctcttggaggttccgtggctataaagataacagaacattcttggaatgctgatctttataagctcatgggacacttcgcatggtggacagcctttgttactaatgtgaatgcgtcatcatctgaagcatttttaattggatgtaattatcttggcaaaccacgcgaacaaatagatggttatgtcatgcatgcaaattacatattttggaggaatacaaatccaattcagttgtcttcctattctttatttgacatgagtaaatttccccttaaattaaggggtactgctgttatgtctttaaaagaaggtcaaatcaatgatatgattttatctcttcttagtaaaggtagacttataattagagaaaacaacagagttgttatttctagtgatgttcttgttaacaactaaacgaacaatggtcttcacactcgaagatttcgttggggactggcgacagacagccggctacaacctggaccaagtccttgaacagggaggtgtgtccagtttgtttcagaatctcggggtgtccgtaactccgatccaaaggattgtcctgagcggtgaaaatgggctgaagatcgacatccatgtcatcatcccgtatgaaggtctgagcggcgaccaaatgggccagatcgaaaaaatttttaaggtggtgtaccctgtggatgatcatcactttaaggtgatcctgcactatggcacactggtaatcgacggggttacgccgaacatgatcgactatttcggacggccgtatgaaggcatcgccgtgttcgacggcaaaaagatcactgtaacagggaccctgtggaacggcaacaaaattatcgacgagcgcctgatcaaccccgacggctccctgctgttccgagtaaccatcaacggagtgaccggctggcggctgtgcgaacgcattctggcgtaaacgaacttatggatttgtttatgagaatcttcacaattggaactgtaactttgaagcaaggtgaaatcaaggatgctactccttcagattttgttcgcgctactgcaacgataccgatacaagcctcactccctttcggatggcttattgttggcgttgcacttcttgctgtttttcagagcgcttccaaaatcataaccctcaaaaagagatggcaactagcactctccaagggtgttcactttgtttgcaacttgctgttgttgtttgtaacagtttactcacaccttttgctcgttgctgctggccttgaagccccttttctctatctttatgctttagtctacttcttgcagagtataaactttgtaagaataataatgaggctttggctttgctggaaatgccgttccaaaaacccattactttatgatgccaactattttctttgctggcatactaattgttacgactattgtataccttacaatagtgtaacttcttcaattgtcattacttcaggtgatggcacaacaagtcctatttctgaacatgactaccagattggtggttatactgaaaaatgggaatctggagtaaaagactgtgttgtattacacagttacttcacttcagactattaccagctgtactcaactcaattgagtacagacactggtgttgaacatgttaccttcttcatctacaataaaattgttgatgagcctgaagaacatgtccaaattcacacaatcgacggttcatccggagttgttaatccagtaatggaaccaatttatgatgaaccgacgacgactactagcgtgcctttgtaagcacaagctgatgagtacgaacttatgatcgagcaggatggcctgcatgccggatctccagctgcctgggttgagagactgttcggctatgattgggcccagcagaccatcggctgttctgatgccgccgtgtttagactgagtgcccagggtagacccgtgctgttcgtgaaaaccgatctgtctggcgccctgaacgagctgcaggatgaagccgctagactgagctggctggctacaacaggcgtgccatgtgctgccgtgctggatgtggttacagaggccggaagagactggctgctgctgggagaagttccaggccaggatctgctgagcagtcatctggcccctgccgagaaggtgtccattatggccgatgccatgcggcggctgcacacacttgatcctgccacctgtcctttcgaccaccaagccaagcaccggatcgagagggccagaaccagaatggaagccggcctggtggaccaggacgacctggatgaagaacaccaaggactggccccagctgagctgttcgccagactgaaagccagaatgcccgacggcgaggatctggtggttacacatggggatgcctgcctgcctaacatcatggtggaaaacggccggttcagcggctttatcgactgtggcagactgggcgtcgccgacagatatcaggatatcgccctggccaccagagatatcgccgaagaacttggcggagagtgggccgatagattcctggtgctgtacggaatcgccgctcctgactctcagcggatcgccttctacagactgctggacgagttcttctgagtgacaacagatgtttcatctcgttgactttcaggttactatagcagagatattactaattattatgaggacttttaaagtttccatttggaatcttgattacatcataaacctcataattaaaaatttatctaagtcactaactgagaataaatattctcaattagatgaagagcaaccaatggagattgattaaacgaacatgaaaattattcttttcttggcactgataacactcgctacttgtgagctttatcactaccaagagtgtgttagaggtacaacagtacttttaaaagaaccttgctcttctggaacatacgagggcaattcaccatttcatcctctagctgataacaaatttgcactgacttgctttagcactcaatttgcttttgcttgtcctgacggcgtaaaacacgtctatcagttacgtgccagatcagtttcacctaaactgttcatcagacaagaggaagttcaagaactttactctccaatttttcttattgttgcggcaatagtgtttataacactttgcttcacactcaaaagaaagacagaatgattgaactttcattaattgacttctatttgtgctttttagcctttctgctattccttgttttaattatgcttattatcttttggttctcacttgaactgcaagatcataatgaaacttgtcacgcctaaacgaacatgaaatttcttgttttcttaggaatcatcacaactgtagctgcatttcaccaagaatgtagtttacagtcatgtactcaacatcaaccatatgtagttgatgacccgtgtcctattcacttctattctaaatggtatattagagtaggagctagaaaatcagcacctttaattgaattgtgcgtggatgaggctggttctaaatcacccattcagtacatcgatatcggtaattatacagtttcctgtttaccttttacaattaattgccaggaacctaaattgggtagtcttgtagtgcgttgttcgttctatgaagactttttagagtatcatgacgttcgtgttgttttagatttcatctaaacgaacaaactaaaatgtctgataatggaccccaaaatcagcgaaatgcaccccgcattacgtttggtggaccctcagattcaactggcagtaaccagaatggagaacgcagtggggcgcgatcaaaacaacgtcggccccaaggtttacccaataatactgcgtcttggttcaccgctctcactcaacatggcaaggaagaccttaaattccctcgaggacaaggcgttccaattaacaccaatagcagtccagatgaccaaattggctactaccgaagagctaccagacgaattcgtggtggtgacggtaaaatgaaagatctcagtccaagatggtatttctactacctaggaactgggccagaagctggacttccctatggtgctaacaaagacggcatcatatgggttgcaactgagggagccttgaatacaccaaaagatcacattggcacccgcaatcctgctaacaatgctgcaatcgtgctacaacttcctcaaggaacaacattgccaaaaggcttctacgcagaagggagcagaggcggcagtcaagcctcttctcgttcctcatcacgtagtcgcaacagttcaagaaattcaactccaggcagcagtaggggaacttctcctgctagaatggctggcaatggcggtgatgctgctcttgctttgctgctgcttgacagattgaaccagcttgagagcaaaatgtctggtaaaggccaacaacaacaaggccaaactgtcactaagaaatctgctgctgaggcttctaagaagcctcggcaaaaacgtactgccactaaagcatacaatgtaacacaagctttcggcagacgtggtccagaacaaacccaaggaaattttggggaccaggaactaatcagacaaggaactgattacaaacattggccgcaaattgcacaatttgcccccagcgcttcagcgttcttcggaatgtcgcgcattggcatggaagtcacaccttcgggaacgtggttgacctacacaggtgccatcaaattggatgacaaagatccaaatttcaaagatcaagtcattttgctgaataagcatattgacgcatacaaaacattcccaccaacagagcctaaaaaggacaaaaagaagaaggctgatgaaactcaagccttaccgcagagacagaagaaacagcaaactgtgactcttcttcctgctgcagatttggatgatttctccaaacaattgcaacaatccatgagcagtgctgactcaactcaggcctaaactcatgcagaccacacaaggcagatgggctatataaacgttttcgcttttccgtttacgatatatagtctactcttgtgcagaatgaattctcgtaactacatagcacaagtagatgtagttaactttaatctcacatagcaatctttaatcagtgtgtaacattagggaggacttgaaagagccaccacattttcaccgaggccacgcggagtacgatcgagtgtacagtgaacaatgctagggagagctgcctatatggaagagccctaatgtgtaaaattaattttagtagtgctatccccatgtgattttaatagcttcttaggagaatgacaaaaaaaaaaaaaaaaaaaaaaaaaagggtcggcatggcatctccacctcctcgcggtccgacctgggcatccgaaggaggacgcacgtccactcggatggctaagggagagcctgcagtagcataaccccttggggcctctaaacgggtcttgaggggttttttg

SEQ ID NO: 8 - DNA, 2796 bp, Artificial Sequence
  Wild-type RNA-dependent RNA polymerase (RdRp)
tcagctgatgcacaatcgtttttaaaccgggtttgcggtgtaagtgcagcccgtcttacaccgtgcggcacaggcactagtactgatgtcgtatacagggcttttgacatctacaatgataaagtagctggttttgctaaattcctaaaaactaattgttgtcgcttccaagaaaaggacgaagatgacaatttaattgattcttactttgtagttaagagacacactttctctaactaccaacatgaagaaacaatttataatttacttaaggattgtccagctgttgctaaacatgacttctttaagtttagaatagacggtgacatggtaccacatatatcacgtcaacgtcttactaaatacacaatggcagacctcgtctatgctttaaggcattttgatgaaggtaattgtgacacattaaaagaaatacttgtcacatacaattgttgtgatgatgattatttcaataaaaaggactggtatgattttgtagaaaacccagatatattacgcgtatacgccaacttaggtgaacgtgtacgccaagctttgttaaaaacagtacaattctgtgatgccatgcgaaatgctggtattgttggtgtactgacattagataatcaagatctcaatggtaactggtatgatttcggtgatttcatacaaaccacgccaggtagtggagttcctgttgtagattcttattattcattgttaatgcctatattaaccttgaccagggctttaactgcagagtcacatgttgacactgacttaacaaagccttacattaagtgggatttgttaaaatatgacttcacggaagagaggttaaaactctttgaccgttattttaaatattgggatcagacataccacccaaattgtgttaactgtttggatgacagatgcattctgcattgtgcaaactttaatgttttattctctacagtgttcccacctacaagttttggaccactagtgagaaaaatatttgttgatggtgttccatttgtagtttcaactggataccacttcagagagctaggtgttgtacataatcaggatgtaaacttacatagctctagacttagttttaaggaattacttgtgtatgctgctgaccctgctatgcacgctgcttctggtaatctattactagataaacgcactacgtgcttttcagtagctgcacttactaacaatgttgcttttcaaactgtcaaacccggtaattttaacaaagacttctatgactttgctgtgtctaagggtttctttaaggaaggaagttctgttgaattaaaacacttcttctttgctcaggatggtaatgctgctatcagcgattatgactactatcgttataatctaccaacaatgtgtgatatcagacaactactatttgtagttgaagttgttgataagtactttgattgttacgatggtggctgtattaatgctaaccaagtcatcgtcaacaacctagacaaatcagctggttttccatttaataaatggggtaaggctagactttattatgattcaatgagttatgaggatcaagatgcacttttcgcatatacaaaacgtaatgtcatccctactataactcaaatgaatcttaagtatgccattagtgcaaagaatagagctcgcaccgtagctggtgtctctatctgtagtactatgaccaatagacagtttcatcaaaaattattgaaatcaatagccgccactagaggagctactgtagtaattggaacaagcaaattctatggtggttggcacaacatgttaaaaactgtttatagtgatgtagaaaaccctcaccttatgggttgggattatcctaaatgtgatagagccatgcctaacatgcttagaattatggcctcacttgttcttgctcgcaaacatacaacgtgttgtagcttgtcacaccgtttctatagattagctaatgagtgtgctcaagtattgagtgaaatggtcatgtgtggcggttcactatatgttaaaccaggtggaacctcatcaggagatgccacaactgcttatgctaatagtgtttttaacatttgtcaagctgtcacggccaatgttaatgcacttttatctactgatggtaacaaaattgccgataagtatgtccgcaatttacaacacagactttatgagtgtctctatagaaatagagatgttgacacagactttgtgaatgagttttacgcatatttgcgtaaacatttctcaatgatgatactctctgacgatgctgttgtgtgtttcaatagcacttatgcatctcaaggtctagtggctagcataaagaactttaagtcagttctttattatcaaaacaatgtttttatgtctgaagcaaaatgttggactgagactgaccttactaaaggacctcatgaattttgctctcaacatacaatgctagttaaacagggtgatgattatgtgtaccttccttacccagatccatcaagaatcctaggggccggctgttttgtagatgatatcgtaaaaacagatggtacacttatgattgaacggttcgtgtctttagctatagatgcttacccacttactaaacatcctaatcaggagtatgctgatgtctttcatttgtacttacaatacataagaaagctacatgatgagttaacaggacacatgttagacatgtattctgttatgcttactaatgataacacttcaaggtattgggaacctgagttttatgaggctatgtacacaccgcatacagtcttacag

SEQ ID NO: 9 - protein, 932 aa, Artificial Sequence
  Wild-type RdRp protein sequence
SADAQSFLNRVCGVSAARLTPCGTGTSTDVVYRAFDIYNDKVAGFAKFLKTNCCRFQEKDEDDNLIDSYFVVKRHTFSNYQHEETIYNLLKDCPAVAKHDFFKFRIDGDMVPHISRQRLTKYTMADLVYALRHFDEGNCDTLKEILVTYNCCDDDYFNKKDWYDFVENPDILRVYANLGERVRQALLKTVQFCDAMRNAGIVGVLTLDNQDLNGNWYDFGDFIQTTPGSGVPVVDSYYSLLMPILTLTRALTAESHVDTDLTKPYIKWDLLKYDFTEERLKLFDRYFKYWDQTYHPNCVNCLDDRCILHCANFNVLFSTVFPPTSFGPLVRKIFVDGVPFVVSTGYHFRELGVVHNQDVNLHSSRLSFKELLVYAADPAMHAASGNLLLDKRTTCFSVAALTNNVAFQTVKPGNFNKDFYDFAVSKGFFKEGSSVELKHFFFAQDGNAAISDYDYYRYNLPTMCDIRQLLFVVEVVDKYFDCYDGGCINANQVIVNNLDKSAGFPFNKWGKARLYYDSMSYEDQDALFAYTKRNVIPTITQMNLKYAISAKNRARTVAGVSICSTMTNRQFHQKLLKSIAATRGATVVIGTSKFYGGWHNMLKTVYSDVENPHLMGWDYPKCDRAMPNMLRIMASLVLARKHTTCCSLSHRFYRLANECAQVLSEMVMCGGSLYVKPGGTSSGDATTAYANSVFNICQAVTANVNALLSTDGNKIADKYVRNLQHRLYECLYRNRDVDTDFVNEFYAYLRKHFSMMILSDDAVVCFNSTYASQGLVASIKNFKSVLYYQNNVFMSEAKCWTETDLTKGPHEFCSQHTMLVKQGDDYVYLPYPDPSRILGAGCFVDDIVKTDGTLMIERFVSLAIDAYPLTKHPNQEYADVFHLYLQYIRKLHDELTGHMLDMYSVMLTNDNTSRYWEPEFYEAMYTPHTVLQ

SEQ ID NO: 10 - protein, 932 aa, Artificial Sequence
  RdRp D760N single mutant protein sequence
SADAQSFLNRVCGVSAARLTPCGTGTSTDVVYRAFDIYNDKVAGFAKFLKTNCCRFQEKDEDDNLIDSYFVVKRHTFSNYQHEETIYNLLKDCPAVAKHDFFKFRIDGDMVPHISRQRLTKYTMADLVYALRHFDEGNCDTLKEILVTYNCCDDDYFNKKDWYDFVENPDILRVYANLGERVRQALLKTVQFCDAMRNAGIVGVLTLDNQDLNGNWYDFGDFIQTTPGSGVPVVDSYYSLLMPILTLTRALTAESHVDTDLTKPYIKWDLLKYDFTEERLKLFDRYFKYWDQTYHPNCVNCLDDRCILHCANFNVLFSTVFPPTSFGPLVRKIFVDGVPFVVSTGYHFRELGVVHNQDVNLHSSRLSFKELLVYAADPAMHAASGNLLLDKRTTCFSVAALTNNVAFQTVKPGNFNKDFYDFAVSKGFFKEGSSVELKHFFFAQDGNAAISDYDYYRYNLPTMCDIRQLLFVVEVVDKYFDCYDGGCINANQVIVNNLDKSAGFPFNKWGKARLYYDSMSYEDQDALFAYTKRNVIPTITQMNLKYAISAKNRARTVAGVSICSTMTNRQFHQKLLKSIAATRGATVVIGTSKFYGGWHNMLKTVYSDVENPHLMGWDYPKCDRAMPNMLRIMASLVLARKHTTCCSLSHRFYRLANECAQVLSEMVMCGGSLYVKPGGTSSGDATTAYANSVFNICQAVTANVNALLSTDGNKIADKYVRNLQHRLYECLYRNRDVDTDFVNEFYAYLRKHFSMMILSNDAVVCFNSTYASQGLVASIKNFKSVLYYQNNVFMSEAKCWTETDLTKGPHEFCSQHTMLVKQGDDYVYLPYPDPSRILGAGCFVDDIVKTDGTLMIERFVSLAIDAYPLTKHPNQEYADVFHLYLQYIRKLHDELTGHMLDMYSVMLTNDNTSRYWEPEFYEAMYTPHTVLQ

SEQ ID NO: 11 - protein, 932 aa, Artificial Sequence
  RdRp D761N single mutant protein sequence
SADAQSFLNRVCGVSAARLTPCGTGTSTDVVYRAFDIYNDKVAGFAKFLKTNCCRFQEKDEDDNLIDSYFVVKRHTFSNYQHEETIYNLLKDCPAVAKHDFFKFRIDGDMVPHISRQRLTKYTMADLVYALRHFDEGNCDTLKEILVTYNCCDDDYFNKKDWYDFVENPDILRVYANLGERVRQALLKTVQFCDAMRNAGIVGVLTLDNQDLNGNWYDFGDFIQTTPGSGVPVVDSYYSLLMPILTLTRALTAESHVDTDLTKPYIKWDLLKYDFTEERLKLFDRYFKYWDQTYHPNCVNCLDDRCILHCANFNVLFSTVFPPTSFGPLVRKIFVDGVPFVVSTGYHFRELGVVHNQDVNLHSSRLSFKELLVYAADPAMHAASGNLLLDKRTTCFSVAALTNNVAFQTVKPGNFNKDFYDFAVSKGFFKEGSSVELKHFFFAQDGNAAISDYDYYRYNLPTMCDIRQLLFVVEVVDKYFDCYDGGCINANQVIVNNLDKSAGFPFNKWGKARLYYDSMSYEDQDALFAYTKRNVIPTITQMNLKYAISAKNRARTVAGVSICSTMTNRQFHQKLLKSIAATRGATVVIGTSKFYGGWHNMLKTVYSDVENPHLMGWDYPKCDRAMPNMLRIMASLVLARKHTTCCSLSHRFYRLANECAQVLSEMVMCGGSLYVKPGGTSSGDATTAYANSVFNICQAVTANVNALLSTDGNKIADKYVRNLQHRLYECLYRNRDVDTDFVNEFYAYLRKHFSMMILSDNAVVCFNSTYASQGLVASIKNFKSVLYYQNNVFMSEAKCWTETDLTKGPHEFCSQHTMLVKQGDDYVYLPYPDPSRILGAGCFVDDIVKTDGTLMIERFVSLAIDAYPLTKHPNQEYADVFHLYLQYIRKLHDELTGHMLDMYSVMLTNDNTSRYWEPEFYEAMYTPHTVLQ

SEQ ID NO: 12 - protein, 932 aa, Artificial Sequence
  RdRp D760N/D761N double mutant protein sequence
SADAQSFLNRVCGVSAARLTPCGTGTSTDVVYRAFDIYNDKVAGFAKFLKTNCCRFQEKDEDDNLIDSYFVVKRHTFSNYQHEETIYNLLKDCPAVAKHDFFKFRIDGDMVPHISRQRLTKYTMADLVYALRHFDEGNCDTLKEILVTYNCCDDDYFNKKDWYDFVENPDILRVYANLGERVRQALLKTVQFCDAMRNAGIVGVLTLDNQDLNGNWYDFGDFIQTTPGSGVPVVDSYYSLLMPILTLTRALTAESHVDTDLTKPYIKWDLLKYDFTEERLKLFDRYFKYWDQTYHPNCVNCLDDRCILHCANFNVLFSTVFPPTSFGPLVRKIFVDGVPFVVSTGYHFRELGVVHNQDVNLHSSRLSFKELLVYAADPAMHAASGNLLLDKRTTCFSVAALTNNVAFQTVKPGNFNKDFYDFAVSKGFFKEGSSVELKHFFFAQDGNAAISDYDYYRYNLPTMCDIRQLLFVVEVVDKYFDCYDGGCINANQVIVNNLDKSAGFPFNKWGKARLYYDSMSYEDQDALFAYTKRNVIPTITQMNLKYAISAKNRARTVAGVSICSTMTNRQFHQKLLKSIAATRGATVVIGTSKFYGGWHNMLKTVYSDVENPHLMGWDYPKCDRAMPNMLRIMASLVLARKHTTCCSLSHRFYRLANECAQVLSEMVMCGGSLYVKPGGTSSGDATTAYANSVFNICQAVTANVNALLSTDGNKIADKYVRNLQHRLYECLYRNRDVDTDFVNEFYAYLRKHFSMMILSNNAVVCFNSTYASQGLVASIKNFKSVLYYQNNVFMSEAKCWTETDLTKGPHEFCSQHTMLVKQGDDYVYLPYPDPSRILGAGCFVDDIVKTDGTLMIERFVSLAIDAYPLTKHPNQEYADVFHLYLQYIRKLHDELTGHMLDMYSVMLTNDNTSRYWEPEFYEAMYTPHTVLQ

SEQ ID NO: 13 - DNA, 36026 bp, Artificial Sequence
  T7-scv2-luc-GFP replicon (that is SEQ ID NO: 2) in a pSMART BAC vector
gcggccgctaatacgactcactatagattaaaggtttataccttcccaggtaacaaaccaaccaactttcgatctcttgtagatctgttctctaaacgaactttaaaatctgtgtggctgtcactcggctgcatgcttagtgcactcacgcagtataattaataactaattactgtcgttgacaggacacgagtaactcgtctatcttctgcaggctgcttacggtttcgtccgtgttgcagccgatcatcagcacatctaggtttcgtccgggtgtgaccgaaaggtaagatggagagccttgtccctggtttcaacgagaaaacacacgtccaactcagtttgcctgttttacaggttcgcgacgtgctcgtacgtggctttggagactccgtggaggaggtcttatcagaggcacgtcaacatcttaaagatggcacttgtggcttagtagaagttgaaaaaggcgttttgcctcaacttgaacagccctatgtgttcatcaaacgttcggatgctcgaactgcacctcatggtcatgttatggttgagctggtagcagaactcgaaggcattcagtacggtcgtagtggtgagacacttggtgtccttgtccctcatgtgggcgaaataccagtggcttaccgcaaggttcttcttcgtaagaacggtaataaaggagctggtggccatagttacggcgccgatctaaagtcatttgacttaggcgacgagcttggcactgatccttatgaagattttcaagaaaactggaacactaaacatagcagtggtgttacccgtgaactcatgcgtgagcttaacggaggggcatacactcgctatgtcgataacaacttctgtggccctgatggctaccctcttgagtgcattaaagaccttctagcacgtgctggtaaagcttcatgcactttgtccgaacaactggactttattgacactaagaggggtgtatactgctgccgtgaacatgagcatgaaattgcttggtacacggaacgttctgaaaagagctatgaattgcagacaccttttgaaattaaattggcaaagaaatttgacaccttcaatggggaatgtccaaattttgtatttcccttaaattccataatcaagactattcaaccaagggttgaaaagaaaaagcttgatggctttatgggtagaattcgatctgtctatccagttgcgtcaccaaatgaatgcaaccaaatgtgcctttcaactctcatgaagtgtgatcattgtggtgaaacttcatggcagacgggcgattttgttaaagccacttgcgaattttgtggcactgagaatttgactaaagaaggtgccactacttgtggttacttaccccaaaatgctgttgttaaaatttattgtccagcatgtcacaattcagaagtaggacctgagcatagtcttgccgaataccataatgaatctggcttgaaaaccattcttcgtaagggtggtcgcactattgcctttggaggctgtgtgttctcttatgttggttgccataacaagtgtgcctattgggttccacgtgctagcgctaacataggttgtaaccatacaggtgttgttggagaaggttccgaaggtcttaatgacaaccttcttgaaatactccaaaaagagaaagtcaacatcaatattgttggtgactttaaacttaatgaagagatcgccattattttggcatctttttctgcttccacaagtgcttttgtggaaactgtgaaaggtttggattataaagcattcaaacaaattgttgaatcctgtggtaattttaaagttacaaaaggaaaagctaaaaaaggtgcctggaatattggtgaacagaaatcaatactgagtcctctttatgcatttgcatcagaggctgctcgtgttgtacgatcaattttctcccgcactcttgaaactgctcaaaattctgtgcgtgttttacagaaggccgctataacaatactagatggaatttcacagtattcactgagactcattgatgctatgatgttcacatctgatttggctactaacaatctagttgtaatggcctacattacaggtggtgttgttcagttgacttcgcagtggctaactaacatctttggcactgtttatgaaaaactcaaacccgtccttgattggcttgaagagaagtttaaggaaggtgtagagtttcttagagacggttgggaaattgttaaatttatctcaacctgtgcttgtgaaattgtcggtggacaaattgtcacctgtgcaaaggaaattaaggagagtgttcagacattctttaagcttgtaaataaatttttggctttgtgtgctgactctatcattattggtggagctaaacttaaagccttgaatttaggtgaaacatttgtcacgcactcaaagggattgtacagaaagtgtgttaaatccagagaagaaactggcctactcatgcctctaaaagccccaaaagaaattatcttcttagagggagaaacacttcccacagaagtgttaacagaggaagttgtcttgaaaactggtgatttacaaccattagaacaacctactagtgaagctgttgaagctccattggttggtacaccagtttgtattaacgggcttatgttgctcgaaatcaaagacacagaaaagtactgtgcccttgcacctaatatgatggtaacaaacaataccttcacactcaaaggcggtgcaccaacaaaggttacttttggtgatgacactgtgatagaagtgcaaggttacaagagtgtgaatatcacttttgaacttgatgaaaggattgataaagtacttaatgagaagtgctctgcctatacagttgaactcggtacagaagtaaatgagttcgcctgtgttgtggcagatgctgtcataaaaactttgcaaccagtatctgaattacttacaccactgggcattgatttagatgagtggagtatggctacatactacttatttgatgagtctggtgagtttaaattggcttcacatatgtattgttctttctaccctccagatgaggatgaagaagaaggtgattgtgaagaagaagagtttgagccatcaactcaatatgagtatggtactgaagatgattaccaaggtaaacctttggaatttggtgccacttctgctgctcttcaacctgaagaagagcaagaagaagattggttagatgatgatagtcaacaaactgttggtcaacaagacggcagtgaggacaatcagacaactactattcaaacaattgttgaggttcaacctcaattagagatggaacttacaccagttgttcagactattgaagtgaatagttttagtggttatttaaaacttactgacaatgtatacattaaaaatgcagacattgtggaagaagctaaaaaggtaaaaccaacagtggttgttaatgcagccaatgtttaccttaaacatggaggaggtgttgcaggagccttaaataaggctactaacaatgccatgcaagttgaatctgatgattacatagctactaatggaccacttaaagtgggtggtagttgtgttttaagcggacacaatcttgctaaacactgtcttcatgttgtcggcccaaatgttaacaaaggtgaagacattcaacttcttaagagtgcttatgaaaattttaatcagcacgaagttctacttgcaccattattatcagctggtatttttggtgctgaccctatacattctttaagagtttgtgtagatactgttcgcacaaatgtctacttagctgtctttgataaaaatctctatgacaaacttgtttcaagctttttggaaatgaagagtgaaaagcaagttgaacaaaagatcgctgagattcctaaagaggaagttaagccatttataactgaaagtaaaccttcagttgaacagagaaaacaagatgataagaaaatcaaagcttgtgttgaagaagttacaacaactctggaagaaactaagttcctcacagaaaacttgttactttatattgacattaatggcaatcttcatccagattctgccactcttgttagtgacattgacatcactttcttaaagaaagatgctccatatatagtgggtgatgttgttcaagagggtgttttaactgctgtggttatacctactaaaaaggctggtggcactactgaaatgctagcgaaagctttgagaaaagtgccaacagacaattatataaccacttacccgggtcagggtttaaatggttacactgtagaggaggcaaagacagtgcttaaaaagtgtaaaagtgccttttacattctaccatctattatctctaatgagaagcaagaaattcttggaactgtttcttggaatttgcgagaaatgcttgcacatgcagaagaaacacgcaaattaatgcctgtctgtgtggaaactaaagccatagtttcaactatacagcgtaaatataagggtattaaaatacaagagggtgtggttgattatggtgctagattttacttttacaccagtaaaacaactgtagcgtcacttatcaacacacttaacgatctaaatgaaactcttgttacaatgccacttggctatgtaacacatggcttaaatttggaagaagctgctcggtatatgagatctctcaaagtgccagctacagtttctgtttcttcacctgatgctgttacagcgtataatggttatcttacttcttcttctaaaacacctgaagaacattttattgaaaccatctcacttgctggttcctataaagattggtcctattctggacaatctacacaactaggtatagaatttcttaagagaggtgataaaagtgtatattacactagtaatcctaccacattccacctagatggtgaagttatcacctttgacaatcttaagacacttctttctttgagagaagtgaggactattaaggtgtttacaacagtagacaacattaacctccacacgcaagttgtggacatgtcaatgacatatggacaacagtttggtccaacttatttggatggagctgatgttactaaaataaaacctcataattcacatgaaggtaaaacattttatgttttacctaatgatgacactctacgtgttgaggcttttgagtactaccacacaactgatcctagttttctgggtaggtacatgtcagcattaaatcacactaaaaagtggaaatacccacaagttaatggtttaacttctattaaatgggcagataacaactgttatcttgccactgcattgttaacactccaacaaatagagttgaagtttaatccacctgctctacaagatgcttattacagagcaagggctggtgaagctgctaacttttgtgcacttatcttagcctactgtaataagacagtaggtgagttaggtgatgttagagaaacaatgagttacttgtttcaacatgccaatttagattcttgcaaaagagtcttgaacgtggtgtgtaaaacttgtggacaacagcagacaacccttaagggtgtagaagctgttatgtacatgggcacactttcttatgaacaatttaagaaaggtgttcagataccttgtacgtgtggtaaacaagctacaaaatatctagtacaacaggagtcaccttttgttatgatgtcagcaccacctgctcagtatgaacttaagcatggtacatttacttgtgctagtgagtacactggtaattaccagtgtggtcactataaacatataacttctaaagaaactttgtattgcatagacggtgctttacttacaaagtcctcagaatacaaaggtcctattacggatgttttctacaaagaaaacagttacacaacaaccataaaaccagttacttataaattggatggtgttgtttgtacagaaattgaccctaagttggacaattattataagaaagacaattcttatttcacagagcaaccaattgatcttgtaccaaaccaaccatatccaaacgcaagcttcgataattttaagtttgtatgtgataatatcaaatttgctgatgatttaaaccagttaactggttataagaaacctgcttcaagagagcttaaagttacatttttccctgacttaaatggtgatgtggtggctattgattataaacactacacaccctcttttaagaaaggagctaaattgttacataaacctattgtttggcatgttaacaatgcaactaataaagccacgtataaaccaaatacctggtgtatacgttgtctttggagcacaaaaccagttgaaacatcaaattcgtttgatgtactgaagtcagaggacgcgcagggaatggataatcttgcctgcgaagatctaaaaccagtctctgaagaagtagtggaaaatcctaccatacagaaagacgttcttgagtgtaatgtgaaaactaccgaagttgtaggagacattatacttaaaccagcaaataatagtttaaaaattacagaagaggttggccacacagatctaatggctgcttatgtagacaattctagtcttactattaagaaacctaatgaattatctagagtattaggtttgaaaacccttgctactcatggtttagctgctgttaatagtgtcccttgggatactatagctaattatgctaagccttttcttaacaaagttgttagtacaactactaacatagttacacggtgtttaaaccgtgtttgtactaattatatgccttatttctttactttattgctacaattgtgtacttttactagaagtacaaattctagaattaaagcatctatgccgactactatagcaaagaatactgttaagagtgtcggtaaattttgtctagaggcttcatttaattatttgaagtcacctaatttttctaaactgataaatattataatttggtttttactattaagtgtttgcctaggttctttaatctactcaaccgctgctttaggtgttttaatgtctaatttaggcatgccttcttactgtactggttacagagaaggctatttgaactctactaatgtcactattgcaacctactgtactggttctataccttgtagtgtttgtcttagtggtttagattctttagacacctatccttctttagaaactatacaaattaccatttcatcttttaaatgggatttaactgcttttggcttagttgcagagtggtttttggcatatattcttttcactaggtttttctatgtacttggattggctgcaatcatgcaattgtttttcagctattttgcagtacattttattagtaattcttggcttatgtggttaataattaatcttgtacaaatggccccgatttcagctatggttagaatgtacatcttctttgcatcattttattatgtatggaaaagttatgtgcatgttgtagacggttgtaattcatcaacttgtatgatgtgttacaaacgtaatagagcaacaagagtcgaatgtacaactattgttaatggtgttagaaggtccttttatgtctatgctaatggaggtaaaggcttttgcaaactacacaattggaattgtgttaattgtgatacattctgtgctggtagtacatttattagtgatgaagttgcgagagacttgtcactacagtttaaaagaccaataaatcctactgaccagtcttcttacatcgttgatagtgttacagtgaagaatggttccatccatctttactttgataaagctggtcaaaagacttatgaaagacattctctctctcattttgttaacttagacaacctgagagctaataacactaaaggttcattgcctattaatgttatagtttttgatggtaaatcaaaatgtgaagaatcatctgcaaaatcagcgtctgtttactacagtcagcttatgtgtcaacctatactgttactagatcaggcattagtgtctgatgttggtgatagtgcggaagttgcagttaaaatgtttgatgcttacgttaatacgttttcatcaacttttaacgtaccaatggaaaaactcaaaacactagttgcaactgcagaagctgaacttgcaaagaatgtgtccttagacaatgtcttatctacttttatttcagcagctcggcaagggtttgttgattcagatgtagaaactaaagatgttgttgaatgtcttaaattgtcacatcaatctgacatagaagttactggcgatagttgtaataactatatgctcacctataacaaagttgaaaacatgacaccccgtgaccttggtgcttgtattgactgtagtgcgcgtcatattaatgcgcaggtagcaaaaagtcacaacattgctttgatatggaacgttaaagatttcatgtcattgtctgaacaactacgaaaacaaatacgtagtgctgctaaaaagaataacttaccttttaagttgacatgtgcaactactagacaagttgttaatgttgtaacaacaaagatagcacttaagggtggtaaaattgttaataattggttgaagcagttaattaaagttacacttgtgttcctttttgttgctgctattttctatttaataacacctgttcatgtcatgtctaaacatactgacttttcaagtgaaatcataggatacaaggctattgatggtggtgtcactcgtgacatagcatctacagatacttgttttgctaacaaacatgctgattttgacacatggtttagccagcgtggtggtagttatactaatgacaaagcttgcccattgattgctgcagtcataacaagagaagtgggttttgtcgtgcctggtttgcctggcacgatattacgcacaactaatggtgactttttgcatttcttacctagagtttttagtgcagttggtaacatctgttacacaccatcaaaacttatagagtacactgactttgcaacatcagcttgtgttttggctgctgaatgtacaatttttaaagatgcttctggtaagccagtaccatattgttatgataccaatgtactagaaggttctgttgcttatgaaagtttacgccctgacacacgttatgtgctcatggatggctctattattcaatttcctaacacctaccttgaaggttctgttagagtggtaacaacttttgattctgagtactgtaggcacggcacttgtgaaagatcagaagctggtgtttgtgtatctactagtggtagatgggtacttaacaatgattattacagatctttaccaggagttttctgtggtgtagatgctgtaaatttacttactaatatgtttacaccactaattcaacctattggtgctttggacatatcagcatctatagtagctggtggtattgtagctatcgtagtaacatgccttgcctactattttatgaggtttagaagagcttttggtgaatacagtcatgtagttgcctttaatactttactattccttatgtcattcactgtactctgtttaacaccagtttactcattcttacctggtgtttattctgttatttacttgtacttgacattttatcttactaatgatgtttcttttttagcacatattcagtggatggttatgttcacacctttagtacctttctggataacaattgcttatatcatttgtatttccacaaagcatttctattggttctttagtaattacctaaagagacgtgtagtctttaatggtgtttcctttagtacttttgaagaagctgcgctgtgcacctttttgttaaataaagaaatgtatctaaagttgcgtagtgatgtgctattacctcttacgcaatataatagatacttagctctttataataagtacaagtattttagtggagcaatggatacaactagctacagagaagctgcttgttgtcatctcgcaaaggctctcaatgacttcagtaactcaggttctgatgttctttaccaaccaccacaaacctctatcacctcagctgttttgcagagtggttttagaaaaatggcattcccatctggtaaagttgagggttgtatggtacaagtaacttgtggtacaactacacttaacggtctttggcttgatgacgtagtttactgtccaagacatgtgatctgcacctctgaagacatgcttaaccctaattatgaagatttactcattcgtaagtctaatcataatttcttggtacaggctggtaatgttcaactcagggttattggacattctatgcaaaattgtgtacttaagcttaaggttgatacagccaatcctaagacacctaagtataagtttgttcgcattcaaccaggacagactttttcagtgttagcttgttacaatggttcaccatctggtgtttaccaatgtgctatgaggcccaatttcactattaagggttcattccttaatggttcatgtggtagtgttggttttaacatagattatgactgtgtctctttttgttacatgcaccatatggaattaccaactggagttcatgctggcacagacttagaaggtaacttttatggaccttttgttgacaggcaaacagcacaagcagctggtacggacacaactattacagttaatgttttagcttggttgtacgctgctgttataaatggagacaggtggtttctcaatcgatttaccacaactcttaatgactttaaccttgtggctatgaagtacaattatgaacctctaacacaagaccatgttgacatactaggacctctttctgctcaaactggaattgccgttttagatatgtgtgcttcattaaaagaattactgcaaaatggtatgaatggacgtaccatattgggtagtgctttattagaagatgaatttacaccttttgatgttgttagacaatgctcaggtgttactttccaaagtgcagtgaaaagaacaatcaagggtacacaccactggttgttactcacaattttgacttcacttttagttttagtccagagtactcaatggtctttgttcttttttttgtatgaaaatgcctttttaccttttgctatgggtattattgctatgtctgcttttgcaatgatgtttgtcaaacataagcatgcatttctctgtttgtttttgttaccttctcttgccactgtagcttattttaatatggtctatatgcctgctagttgggtgatgcgtattatgacatggttggatatggttgatactagtttgtctggttttaagctaaaagactgtgttatgtatgcatcagctgtagtgttactaatccttatgacagcaagaactgtgtatgatgatggtgctaggagagtgtggacacttatgaatgtcttgacactcgtttataaagtttattatggtaatgctttagatcaagccatttccatgtgggctcttataatctctgttacttctaactactcaggtgtagttacaactgtcatgtttttggccagaggtattgtttttatgtgtgttgagtattgccctattttcttcataactggtaatacacttcagtgtataatgctagtttattgtttcttaggctatttttgtacttgttactttggcctcttttgtttactcaaccgctactttagactgactcttggtgtttatgattacttagtttctacacaggagtttagatatatgaattcacagggactactcccacccaagaatagcatagatgccttcaaactcaacattaaattgttgggtgttggtggcaaaccttgtatcaaagtagccactgtacagtctaaaatgtcagatgtaaagtgcacatcagtagtcttactctcagttttgcaacaactcagagtagaatcatcatctaaattgtgggctcaatgtgtccagttacacaatgacattctcttagctaaagatactactgaagcctttgaaaaaatggtttcactactttctgttttgctttccatgcagggtgctgtagacataaacaagctttgtgaagaaatgctggacaacagggcaaccttacaagctatagcctcagagtttagttcccttccatcatatgcagcttttgctactgctcaagaagcttatgagcaggctgttgctaatggtgattctgaagttgttcttaaaaagttgaagaagtctttgaatgtggctaaatctgaatttgaccgtgatgcagccatgcaacgtaagttggaaaagatggctgatcaagctatgacccaaatgtataaacaggctagatctgaggacaagagggcaaaagttactagtgctatgcagacaatgcttttcactatgcttagaaagttggataatgatgcactcaacaacattatcaacaatgcaagagatggttgtgttcccttgaacataatacctcttacaacagcagccaaactaatggttgtcataccagactataacacatataaaaatacgtgtgatggtacaacatttacttatgcatcagcattgtgggaaatccaacaggttgtagatgcagatagtaaaattgttcaacttagtgaaattagtatggacaattcacctaatttagcatggcctcttattgtaacagctttaagggccaattctgctgtcaaattacagaataatgagcttagtcctgttgcactacgacagatgtcttgtgctgccggtactacacaaactgcttgcactgatgacaatgcgttagcttactacaacacaacaaagggaggtaggtttgtacttgcactgttatccgatttacaggatttgaaatgggctagattccctaagagtgatggaactggtactatctatacagaactggaaccaccttgtaggtttgttacagacacacctaaaggtcctaaagtgaagtatttatactttattaaaggattaaacaacctaaatagaggtatggtacttggtagtttagctgccacagtacgtctacaagctggtaatgcaacagaagtgcctgccaattcaactgtattatctttctgtgcttttgctgtagatgctgctaaagcttacaaagattatctagctagtgggggacaaccaatcactaattgtgttaagatgttgtgtacacacactggtactggtcaggcaataacagttacaccggaagccaatatggatcaagaatcctttggtggtgcatcgtgttgtctgtactgccgttgccacatagatcatccaaatcctaaaggattttgtgacttaaaaggtaagtatgtacaaatacctacaacttgtgctaatgaccctgtgggttttacacttaaaaacacagtctgtaccgtctgcggtatgtggaaaggttatggctgtagttgtgatcaactccgcgaacccatgcttcagtcagctgatgcacaatcgtttttaaacgggtttgcggtgtaagtgcagcccgtcttacaccgtgcggcacaggcactagtactgatgtcgtatacagggcttttgacatctacaatgataaagtagctggttttgctaaattcctaaaaactaattgttgtcgcttccaagaaaaggacgaagatgacaatttaattgattcttactttgtagttaagagacacactttctctaactaccaacatgaagaaacaatttataatttacttaaggattgtccagctgttgctaaacatgacttctttaagtttagaatagacggtgacatggtaccacatatatcacgtcaacgtcttactaaatacacaatggcagacctcgtctatgctttaaggcattttgatgaaggtaattgtgacacattaaaagaaatacttgtcacatacaattgttgtgatgatgattatttcaataaaaaggactggtatgattttgtagaaaacccagatatattacgcgtatacgccaacttaggtgaacgtgtacgccaagctttgttaaaaacagtacaattctgtgatgccatgcgaaatgctggtattgttggtgtactgacattagataatcaagatctcaatggtaactggtatgatttcggtgatttcatacaaaccacgccaggtagtggagttcctgttgtagattcttattattcattgttaatgcctatattaaccttgaccagggctttaactgcagagtcacatgttgacactgacttaacaaagccttacattaagtgggatttgttaaaatatgacttcacggaagagaggttaaaactctttgaccgttattttaaatattgggatcagacataccacccaaattgtgttaactgtttggatgacagatgcattctgcattgtgcaaactttaatgttttattctctacagtgttcccacctacaagttttggaccactagtgagaaaaatatttgttgatggtgttccatttgtagtttcaactggataccacttcagagagctaggtgttgtacataatcaggatgtaaacttacatagctctagacttagttttaaggaattacttgtgtatgctgctgaccctgctatgcacgctgcttctggtaatctattactagataaacgcactacgtgcttttcagtagctgcacttactaacaatgttgcttttcaaactgtcaaacccggtaattttaacaaagacttctatgactttgctgtgtctaagggtttctttaaggaaggaagttctgttgaattaaaacacttcttctttgctcaggatggtaatgctgctatcagcgattatgactactatcgttataatctaccaacaatgtgtgatatcagacaactactatttgtagttgaagttgttgataagtactttgattgttacgatggtggctgtattaatgctaaccaagtcatcgtcaacaacctagacaaatcagctggttttccatttaataaatggggtaaggctagactttattatgattcaatgagttatgaggatcaagatgcacttttcgcatatacaaaacgtaatgtcatccctactataactcaaatgaatcttaagtatgccattagtgcaaagaatagagctcgcaccgtagctggtgtctctatctgtagtactatgaccaatagacagtttcatcaaaaattattgaaatcaatagccgccactagaggagctactgtagtaattggaacaagcaaattctatggtggttggcacaacatgttaaaaactgtttatagtgatgtagaaaaccctcaccttatgggttgggattatcctaaatgtgatagagccatgcctaacatgcttagaattatggcctcacttgttcttgctcgcaaacatacaacgtgttgtagcttgtcacaccgtttctatagattagctaatgagtgtgctcaagtattgagtgaaatggtcatgtgtggcggttcactatatgttaaaccaggtggaacctcatcaggagatgccacaactgcttatgctaatagtgtttttaacatttgtcaagctgtcacggccaatgttaatgcacttttatctactgatggtaacaaaattgccgataagtatgtccgcaatttacaacacagactttatgagtgtctctatagaaatagagatgttgacacagactttgtgaatgagttttacgcatatttgcgtaaacatttctcaatgatgatactctctgacgatgctgttgtgtgtttcaatagcacttatgcatctcaaggtctagtggctagcataaagaactttaagtcagttctttattatcaaaacaatgtttttatgtctgaagcaaaatgttggactgagactgaccttactaaaggacctcatgaattttgctctcaacatacaatgctagttaaacagggtgatgattatgtgtaccttccttacccagatccatcaagaatcctaggggccggctgttttgtagatgatatcgtaaaaacagatggtacacttatgattgaacggttcgtgtctttagctatagatgcttacccacttactaaacatcctaatcaggagtatgctgatgtctttcatttgtacttacaatacataagaaagctacatgatgagttaacaggacacatgttagacatgtattctgttatgcttactaatgataacacttcaaggtattgggaacctgagttttatgaggctatgtacacaccgcatacagtcttacaggctgttggggcttgtgttctttgcaattcacagacttcattaagatgtggtgcttgcatacgtagaccattcttatgttgtaaatgctgttacgaccatgtcatatcaacatcacataaattagtcttgtctgttaatccgtatgtttgcaatgctccaggttgtgatgtcacagatgtgactcaactttacttaggaggtatgagctattattgtaaatcacataaaccacccattagttttccattgtgtgctaatggacaagtttttggtttatataaaaatacatgtgttggtagcgataatgttactgactttaatgcaattgcaacatgtgactggacaaatgctggtgattacattttagctaacacctgtactgaaagactcaagctttttgcagcagaaacgctcaaagctactgaggagacatttaaactgtcttatggtattgctactgtacgtgaagtgctgtctgacagagaattacatctttcatgggaagttggtaaacctagaccaccacttaaccgaaattatgtctttactggttatcgtgtaactaaaaacagtaaagtacaaataggagagtacacctttgaaaaaggtgactatggtgatgctgttgtttaccgaggtacaacaacttacaaattaaatgttggtgattattttgtgctgacatcacatacagtaatgccattaagtgcacctacactagtgccacaagagcactatgttagaattactggcttatacccaacactcaatatctcagatgagttttctagcaatgttgcaaattatcaaaaggttggtatgcaaaagtattctacactccagggaccacctggtactggtaagagtcattttgctattggcctagctctctactacccttctgctcgcatagtgtatacagcttgctctcatgccgctgttgatgcactatgtgagaaggcattaaaatatttgcctatagataaatgtagtagaattatacctgcacgtgctcgtgtagagtgttttgataaattcaaagtgaattcaacattagaacagtatgtcttttgtactgtaaatgcattgcctgagacgacagcagatatagttgtctttgatgaaatttcaatggccacaaattatgatttgagtgttgtcaatgccagattacgtgctaagcactatgtgtacattggcgaccctgctcaattacctgcaccacgcacattgctaactaagggcacactagaaccagaatatttcaattcagtgtgtagacttatgaaaactataggtccagacatgttcctcggaacttgtcggcgttgtcctgctgaaattgttgacactgtgagtgctttggtttatgataataagcttaaagcacataaagacaaatcagctcaatgctttaaaatgttttataagggtgttatcacgcatgatgtttcatctgcaattaacaggccacaaataggcgtggtaagagaattccttacacgtaaccctgcttggagaaaagctgtctttatttcaccttataattcacagaatgctgtagcctcaaagattttgggactaccaactcaaactgttgattcatcacagggctcagaatatgactatgtcatattcactcaaaccactgaaacagctcactcttgtaatgtaaacagatttaatgttgctattaccagagcaaaagtaggcatactttgcataatgtctgatagagacctttatgacaagttgcaatttacaagtcttgaaattccacgtaggaatgtggcaactttacaagctgaaaatgtaacaggactctttaaagattgtagtaaggtaatcactgggttacatcctacacaggcacctacacacctcagtgttgacactaaattcaaaactgaaggtttatgtgttgacatacctggcatacctaaggacatgacctatagaagactcatctctatgatgggttttaaaatgaattatcaagttaatggttaccctaacatgtttatcacccgcgaagaagctataagacatgtacgtgcatggattggcttcgatgtcgaggggtgtcatgctactagagaagctgttggtaccaatttacctttacagctaggtttttctacaggtgttaacctagttgctgtacctacaggttatgttgatacacctaataatacagatttttccagagttagtgctaaaccaccgcctggagatcaatttaaacacctcataccacttatgtacaaaggacttccttggaatgtagtgcgtataaagattgtacaaatgttaagtgacacacttaaaaatctctctgacagagtcgtatttgtcttatgggcacatggctttgagttgacatctatgaagtattttgtgaaaataggacctgagcgcacctgttgtctatgtgatagacgtgccacatgcttttccactgcttcagacacttatgcctgttggcatcattctattggatttgattacgtctataatccgtttatgattgatgttcaacaatggggttttacaggtaacctacaaagcaaccatgatctgtattgtcaagtccatggtaatgcacatgtagctagttgtgatgcaatcatgactaggtgtctagctgtccacgagtgctttgttaagcgtgttgactggactattgaatatcctataattggtgatgaactgaagattaatgcggcttgtagaaaggttcaacacatggttgttaaagctgcattattagcagacaaattcccagttcttcacgacattggtaaccctaaagctattaagtgtgtacctcaagctgatgtagaatggaagttctatgatgcacagccttgtagtgacaaagcttataaaatagaagaattattctattcttatgccacacattctgacaaattcacagatggtgtatgcctattttggaattgcaatgtcgatagatatcctgctaattccattgtttgtagatttgacactagagtgctatctaaccttaacttgcctggttgtgatggtggcagtttgtatgtaaataaacatgcattccacacaccagcttttgataaaagtgcttttgttaatttaaaacaattaccatttttctattactctgacagtccatgtgagtctcatggaaaacaagtagtgtcagatatagattatgtaccactaaagtctgctacgtgtataacacgttgcaatttaggtggtgctgtctgtagacatcatgctaatgagtacagattgtatctcgatgcttataacatgatgatctcagctggctttagcttgtgggtttacaaacaatttgatacttataacctctggaacacttttacaagacttcagagtttagaaaatgtggcttttaatgttgtaaataagggacactttgatggacaacagggtgaagtaccagtttctatcattaataacactgtttacacaaaagttgatggtgttgatgtagaattgtttgaaaataaaacaacattacctgttaatgtagcatttgagctttgggctaagcgcaacattaaaccagtaccagaggtgaaaatactcaataatttgggtgtggacattgctgctaatactgtgatctgggactacaaaagagatgctccagcacatatatctactattggtgtttgttctatgactgacatagccaagaaaccaactgaaacgatttgtgcaccactcactgtcttttttgatggtagagttgatggtcaagtagacttatttagaaatgcccgtaatggtgttcttattacagaaggtagtgttaaaggtttacaaccatctgtaggtcccaaacaagctagtcttaatggagtcacattaattggagaagccgtaaaaacacagttcaattattataagaaagttgatggtgttgtccaacaattacctgaaacttactttactcagagtagaaatttacaagaatttaaacccaggagtcaaatggaaattgatttcttagaattagctatggatgaattcattgaacggtataaattagaaggctatgccttcgaacatatcgtttatggagattttagtcatagtcagttaggtggtttacatctactgattggactagctaaacgttttaaggaatcaccttttgaattagaagattttattcctatggacagtacagttaaaaactatttcataacagatgcgcaaacaggttcatctaagtgtgtgtgttctgttattgatttattacttgatgattttgttgaaataataaaatcccaagatttatctgtagtttctaaggttgtcaaagtgactattgactatacagaaatttcatttatgctttggtgtaaagatggccatgtagaaacattttacccaaaattacaatctagtcaagcgtggcaaccgggtgttgctatgcctaatctttacaaaatgcaaagaatgctattagaaaagtgtgaccttcaaaattatggtgatagtgcaacattacctaaaggcataatgatgaatgtcgcaaaatatactcaactgtgtcaatatttaaacacattaacattagctgtaccctataatatgagagttatacattttggtgctggttctgataaaggagttgcaccaggtacagctgttttaagacagtggttgcctacgggtacgctgcttgtcgattcagatcttaatgactttgtctctgatgcagattcaactttgattggtgattgtgcaactgtacatacagctaataaatgggatctcattattagtgatatgtacgaccctaagactaaaaatgttacaaaagaaaatgactctaaagagggttttttcacttacatttgtgggtttatacaacaaaagctagctcttggaggttccgtggctataaagataacagaacattcttggaatgctgatctttataagctcatgggacacttcgcatggtggacagcctttgttactaatgtgaatgcgtcatcatctgaagcatttttaattggatgtaattatcttggcaaaccacgcgaacaaatagatggttatgtcatgcatgcaaattacatattttggaggaatacaaatccaattcagttgtcttcctattctttatttgacatgagtaaatttccccttaaattaaggggtactgctgttatgtctttaaaagaaggtcaaatcaatgatatgattttatctcttcttagtaaaggtagacttataattagagaaaacaacagagttgttatttctagtgatgttcttgttaacaactaaacgaacaatggaagatgccaaaaacattaagaagggcccagcgccattctacccactcgaagacgggaccgccggcgagcagctgcacaaagccatgaagcgctacgccctggtgcccggcaccatcgcctttaccgacgcacatatcgaggtggacattacctacgccgagtacttcgagatgagcgttcggctggcagaagctatgaagcgctatgggctgaatacaaaccatcggatcgtggtgtgcagcgagaatagcttgcagttcttcatgcccgtgttgggtgccctgttcatcggtgtggctgtggccccagctaacgacatctacaacgagcgcgagctgctgaacagcatgggcatcagccagcccaccgtcgtattcgtgagcaagaaagggctgcaaaagatcctcaacgtgcaaaagaagctaccgatcatacaaaagatcatcatcatggatagcaagaccgactaccagggcttccaaagcatgtacaccttcgtgacttcccatttgccacccggcttcaacgagtacgacttcgtgcccgagagcttcgaccgggacaaaaccatcgccctgatcatgaacagtagtggcagtaccggattgcccaagggcgtagccctaccgcaccgcaccgcttgtgtccgattcagtcatgcccgcgaccccatcttcggcaaccagatcatccccgacaccgctatcctcagcgtggtgccatttcaccacggcttcggcatgttcaccacgctgggctacttgatctgcggctttcgggtcgtgctcatgtaccgcttcgaggaggagctattcttgcgcagcttgcaagactataagattcaatctgccctgctggtgcccacactatttagcttcttcgctaagagcactctcatcgacaagtacgacctaagcaacttgcacgagatcgccagcggcggggcgccgctcagcaaggaggtaggtgaggccgtggccaaacgcttccacctaccaggcatccgccagggctacggcctgacagaaacaaccagcgccattctgatcacccccgaaggggacgacaagcctggcgcagtaggcaaggtggtgcccttcttcgaggctaaggtggtggacttggacaccggtaagacactgggtgtgaaccagcgcggcgagctgtgcgtccgtggccccatgatcatgagcggctacgttaacaaccccgaggctacaaacgctctcatcgacaaggacggctggctgcacagcggcgacatcgcctactgggacgaggacgagcacttcttcatcgtggaccggctgaagagcctgatcaaatacaagggctaccaggtagccccagccgaactggagagcatcctgctgcaacaccccaacatcttcgacgccggggtcgccggcctgcccgacgacgatgccggcgagctgcccgccgcagtcgtcgtgctggaacacggtaaaaccatgaccgagaaggagatcgtggactatgtggccagccaggttacaaccgccaagaagctgcgcggtggtgttgtgttcgtggacgaggtgcctaaaggactgaccggcaagttggacgcccgcaagatccgcgagattctcattaaggccaagaagggcggcaagatcgccgtgcagtcgacggtaccgcgggcccgggatccaccggtcgccaccatggtgagcaagggcgaggagctgttcaccggggtggtgcccatcctggtcgagctggacggcgacgtaaacggccacaagttcagcgtgtccggcgagggcgagggcgatgccacctacggcaagctgaccctgaagttcatctgcaccaccggcaagctgcccgtgccctggcccaccctcgtgaccaccctgacctacggcgtgcagtgcttcagccgctaccccgaccacatgaagcagcacgacttcttcaagtccgccatgcccgaaggctacgtccaggagcgcaccatcttcttcaaggacgacggcaactacaagacccgcgccgaggtgaagttcgagggcgacaccctggtgaaccgcatcgagctgaagggcatcgacttcaaggaggacggcaacatcctggggcacaagctggagtacaactacaacagccacaacgtctatatcatggccgacaagcagaagaacggcatcaaggtgaacttcaagatccgccacaacatcgaggacggcagcgtgcagctcgccgaccactaccagcagaacacccccatcggcgacggccccgtgctgctgcccgacaaccactacctgagcacccagtccgccctgagcaaagaccccaacgagaagcgcgatcacatggtcctgctggagttcgtgaccgccgccgggatcactctcggcatggacgagctgtacaagtaaacgaacttatggatttgtttatgagaatcttcacaattggaactgtaactttgaagcaaggtgaaatcaaggatgctactccttcagattttgttcgcgctactgcaacgataccgatacaagcctcactccctttcggatggcttattgttggcgttgcacttcttgctgtttttcagagcgcttccaaaatcataaccctcaaaaagagatggcaactagcactctccaagggtgttcactttgtttgcaacttgctgttgttgtttgtaacagtttactcacaccttttgctcgttgctgctggccttgaagccccttttctctatctttatgctttagtctacttcttgcagagtataaactttgtaagaataataatgaggctttggctttgctggaaatgccgttccaaaaacccattactttatgatgccaactattttctttgctggcatactaattgttacgactattgtataccttacaatagtgtaacttcttcaattgtcattacttcaggtgatggcacaacaagtcctatttctgaacatgactaccagattggtggttatactgaaaaatgggaatctggagtaaaagactgtgttgtattacacagttacttcacttcagactattaccagctgtactcaactcaattgagtacagacactggtgttgaacatgttaccttcttcatctacaataaaattgttgatgagcctgaagaacatgtccaaattcacacaatcgacggttcatccggagttgttaatccagtaatggaaccaatttatgatgaaccgacgacgactactagcgtgcctttgtaagcacaagctgatgagtacgaacttatgatcgagcaggatggcctgcatgccggatctccagctgcctgggttgagagactgttcggctatgattgggcccagcagaccatcggctgttctgatgccgccgtgtttagactgagtgcccagggtagacccgtgctgttcgtgaaaaccgatctgtctggcgccctgaacgagctgcaggatgaagccgctagactgagctggctggctacaacaggcgtgccatgtgctgccgtgctggatgtggttacagaggccggaagagactggctgctgctgggagaagttccaggccaggatctgctgagcagtcatctggcccctgccgagaaggtgtccattatggccgatgccatgcggcggctgcacacacttgatcctgccacctgtcctttcgaccaccaagccaagcaccggatcgagagggccagaaccagaatggaagccggcctggtggaccaggacgacctggatgaagaacaccaaggactggccccagctgagctgttcgccagactgaaagccagaatgcccgacggcgaggatctggtggttacacatggggatgcctgcctgcctaacatcatggtggaaaacggccggttcagcggctttatcgactgtggcagactgggcgtcgccgacagatatcaggatatcgccctggccaccagagatatcgccgaagaacttggcggagagtgggccgatagattcctggtgctgtacggaatcgccgctcctgactctcagcggatcgccttctacagactgctggacgagttcttctgagtgacaacagatgtttcatctcgttgactttcaggttactatagcagagatattactaattattatgaggacttttaaagtttccatttggaatcttgattacatcataaacctcataattaaaaatttatctaagtcactaactgagaataaatattctcaattagatgaagagcaaccaatggagattgattaaacgaacatgaaaattattcttttcttggcactgataacactcgctacttgtgagctttatcactaccaagagtgtgttagaggtacaacagtacttttaaaagaaccttgctcttctggaacatacgagggcaattcaccatttcatcctctagctgataacaaatttgcactgacttgctttagcactcaatttgcttttgcttgtcctgacggcgtaaaacacgtctatcagttacgtgccagatcagtttcacctaaactgttcatcagacaagaggaagttcaagaactttactctccaatttttcttattgttgcggcaatagtgtttataacactttgcttcacactcaaaagaaagacagaatgattgaactttcattaattgacttctatttgtgctttttagcctttctgctattccttgttttaattatgcttattatcttttggttctcacttgaactgcaagatcataatgaaacttgtcacgcctaaacgaacatgaaatttcttgttttcttaggaatcatcacaactgtagctgcatttcaccaagaatgtagtttacagtcatgtactcaacatcaaccatatgtagttgatgacccgtgtcctattcacttctattctaaatggtatattagagtaggagctagaaaatcagcacctttaattgaattgtgcgtggatgaggctggttctaaatcacccattcagtacatcgatatcggtaattatacagtttcctgtttaccttttacaattaattgccaggaacctaaattgggtagtcttgtagtgcgttgttcgttctatgaagactttttagagtatcatgacgttcgtgttgttttagatttcatctaaacgaacaaactaaaatgtctgataatggaccccaaaatcagcgaaatgcaccccgcattacgtttggtggaccctcagattcaactggcagtaaccagaatggagaacgcagtggggcgcgatcaaaacaacgtcggccccaaggtttacccaataatactgcgtcttggttcaccgctctcactcaacatggcaaggaagaccttaaattccctcgaggacaaggcgttccaattaacaccaatagcagtccagatgaccaaattggctactaccgaagagctaccagacgaattcgtggtggtgacggtaaaatgaaagatctcagtccaagatggtatttctactacctaggaactgggccagaagctggacttccctatggtgctaacaaagacggcatcatatgggttgcaactgagggagccttgaatacaccaaaagatcacattggcacccgcaatcctgctaacaatgctgcaatcgtgctacaacttcctcaaggaacaacattgccaaaaggcttctacgcagaagggagcagaggcggcagtcaagcctcttctcgttcctcatcacgtagtcgcaacagttcaagaaattcaactccaggcagcagtaggggaacttctcctgctagaatggctggcaatggcggtgatgctgctcttgctttgctgctgcttgacagattgaaccagcttgagagcaaaatgtctggtaaaggccaacaacaacaaggccaaactgtcactaagaaatctgctgctgaggcttctaagaagcctcggcaaaaacgtactgccactaaagcatacaatgtaacacaagctttcggcagacgtggtccagaacaaacccaaggaaattttggggaccaggaactaatcagacaaggaactgattacaaacattggccgcaaattgcacaatttgcccccagcgcttcagcgttcttcggaatgtcgcgcattggcatggaagtcacaccttcgggaacgtggttgacctacacaggtgccatcaaattggatgacaaagatccaaatttcaaagatcaagtcattttgctgaataagcatattgacgcatacaaaacattcccaccaacagagcctaaaaaggacaaaaagaagaaggctgatgaaactcaagccttaccgcagagacagaagaaacagcaaactgtgactcttcttcctgctgcagatttggatgatttctccaaacaattgcaacaatccatgagcagtgctgactcaactcaggcctaaactcatgcagaccacacaaggcagatgggctatataaacgttttcgcttttccgtttacgatatatagtctactcttgtgcagaatgaattctcgtaactacatagcacaagtagatgtagttaactttaatctcacatagcaatctttaatcagtgtgtaacattagggaggacttgaaagagccaccacattttcaccgaggccacgcggagtacgatcgagtgtacagtgaacaatgctagggagagctgcctatatggaagagccctaatgtgtaaaattaattttagtagtgctatccccatgtgattttaatagcttcttaggagaatgacaaaaaaaaaaaaaaaaaaaaaaaaaagggtcggcatggcatctccacctcctcgcggtccgacctgggcatccgaaggaggacgcacgtccactcggatggctaagggagagcctgcagtagcataaccccttggggcctctaaacgggtcttgaggggttttttggcggccgcttctatagtgtcacctaaatactagtgactccagcgtaactggactggccacagttaggccgcaaatgtaatcacactggctcaccttcgggtgggcctttctgcgttcgcgagtggacccgataagctcatggagcggcgtaaccgtcgcacaggaaggacagagaaagcgcggatctgggaagtgacggacagaacggtcaggacctggattggggaggcggttgccgccgctgctgctgacggtgtgacgttctctgttccggtcacaccacatacgttccgccattcctatgcgatgcacatgctgtatgccggtataccgctgaaagttctgcaaagcctgatgggacataagtccatcagttcaacggaagtctacacgaaggtttttgcgctggatgtggctgcccggcaccgggtgcagtttgcgatgccggagtctgatgcggttgcgatgctgaaacaattatcctgagaataaatgccttggcctttatatggaaatgtggaactgagtggatatgctgtttttgtctgttaaacagagaagctggctgttatccactgagaagcgaacgaaacagtcgggaaaatctcccattatcgtagagatccgcattattaatctcaggagcctgtgtagcgtttataggaagtagtgttctgtcatgatgcctgcaagcggtaacgaaaacgatttgaatatgccttcaggaacaatagaaatcttcgtgcggtgttacgttgaagtggagcggattatgtcagcaatggacagaacaacctaatgaacacagaaccatgatgtggtctgtccttttacagccagtagtgctcgccgcagtcgagcgacagggcgaagccctcggctggttgccctcgccgctgggctggcggccgtctatggccctgcaaacgcgccagaaacgccgtcgaagccgtgtgcgagacaccgcggccggccgccggcgttgtggatacctcgcggaaaacttggccctcactgacagatgaggggcggacgttgacacttgaggggccgactcacccggcgcggcgttgacagatgaggggcaggctcgatttcggccggcgacgtggagctggccagcctcgcaaatcggcgaaaacgcctgattttacgcgagtttcccacagatgatgtggacaagcctggggataagtgccctgcggtattgacacttgaggggcgcgactactgacagatgaggggcgcgatccttgacacttgaggggcagagtgctgacagatgaggggcgcacctattgacatttgaggggctgtccacaggcagaaaatccagcatttgcaagggtttccgcccgtttttcggccaccgctaacctgtcttttaacctgcttttaaaccaatatttataaaccttgtttttaaccagggctgcgccctgtgcgcgtgaccgcgcacgccgaaggggggtgcccccccttctcgaaccctcccggtcgagtgagcgaggaagcaccagggaacagcacttatatattctgcttacacacgatgcctgaaaaaacttcccttggggttatccacttatccacggggatatttttataattattttttttatagtttttagatcttcttttttagagcgccttgtaggcctttatccatgctggttctagagaaggtgttgtgacaaattgccctttcagtgtgacaaatcaccctcaaatgacagtcctgtctgtgacaaattgcccttaaccctgtgacaaattgccctcagaagaagctgttttttcacaaagttatccctgcttattgactcttttttatttagtgtgacaatctaaaaacttgtcacacttcacatggatctgtcatggcggaaacagcggttatcaatcacaagaaacgtaaaaatagcccgcgaatcgtccagtcaaacgacctcactgaggcggcatatagtctctcccgggatcaaaaacgtatgctgtatctgttcgttgaccagatcagaaaatctgatggcaccctacaggaacatgacggtatctgcgagatccatgttgctaaatatgctgaaatattcggattgacctctgcggaagccagtaaggatatacggcaggcattgaagagtttcgcggggaaggaagtggttttttatcgccctgaagaggatgccggcgatgaaaaaggctatgaatcttttccttggtttatcaaacgtgcgcacagtccatccagagggctttacagtgtacatatcaacccatatctcattcccttctttatcgggttacagaaccggtttacgcagtttcggcttagtgaaacaaaagaaatcaccaatccgtatgccatgcgtttatacgaatccctgtgtcagtatcgtaagccggatggctcaggcatcgtctctctgaaaatcgactggatcatagagcgttaccagctgcctcaaagttaccagcgtatgcctgacttccgccgccgcttcctgcaggtctgtgttaatgagatcaacagcagaactccaatgcgcctctcatacattgagaaaaagaaaggccgccagacgactcatatcgtattttccttccgcgatatcacttccatgacgacaggatagtctgagggttatctgtcacagatttgagggtggttcgtcacatttgttctgacctactgagggtaatttgtcacagttttgctgtttccttcagcctgcatggattttctcatactttttgaactgtaatttttaaggaagccaaatttgagggcagtttgtcacagttgatttccttctctttcccttcgtcatgtgacctgatatcgggggttagttcgtcatcattgatgagggttgattatcacagtttattactctgaattggctatccgcgtgtgtacctctacctggagtttttcccacggtggatatttcttcttgcgctgagcgtaagagctatctgacagaacagttcttctttgcttcctcgccagttcgctcgctatgctcggttacacggctgcggcgagcgctagtgataataagtgactgaggtatgtgctcttcttatctccttttgtagtgttgctcttattttaaacaactttgcggttttttgatgactttgcgattttgttgttgctttgcagtaaattgcaagatttaataaaaaaacgcaaagcaatgattaaaggatgttcagaatgaaactcatggaaacacttaaccagtgcataaacgctggtcatgaaatgacgaaggctatcgccattgcacagtttaatgatgacagcccggaagcgaggaaaataacccggcgctggagaataggtgaagcagcggatttagttggggtttcttctcaggctatcagagatgccgagaaagcagggcgactaccgcacccggatatggaaattcgaggacgggttgagcaacgtgttggttatacaattgaacaaattaatcatatgcgtgatgtgtttggtacgcgattgcgacgtgctgaagacgtatttccaccggtgatcggggttgctgcccataaaggaggcgtttacaaaacctcagtttctgttcatcttgctcaggatctggctctgaaggggctacgtgttttgctcgtggaaggtaacgacccccagggaacagcctcaatgtatcacggatgggtaccagatcttcatattcatgcagaagacactctcctgcctttctatcttggggaaaaggacgatgtcacttatgcaataaagcccacttgctggccggggcttgacattattccttcctgtctggctctgcaccgtattgaaactgagttaatgggcaaatttgatgaaggtaaactgcccaccgatccacacctgatgctccgactggccattgaaactgttgctcatgactatgatgtcatagttattgacagcgcgcctaacctgggtatcggcacgattaatgtcgtatgtgctgctgatgtgctgattgttcccacgcctgctgagttgtttgactacacctccgcactgcagtttttcgatatgcttcgtgatctgctcaagaacgttgatcttaaagggttcgagcctgatgtacgtattttgcttaccaaatacagcaatagtaatggctctcagtccccgtggatggaggagcaaattcgggatgcctggggaagcatggttctaaaaaatgttgtacgtgaaacggatgaagttggtaaaggtcagatccggatgagaactgtttttgaacaggccattgatcaacgctcttcaactggtgcctggagaaatgctctttctatttgggaacctgtctgcaatgaaattttcgatcgtctgattaaaccacgctgggagattagataatgaagcgtgcgcctgttattccaaaacatacgctcaatactcaaccggttgaagatacttcgttatcgacaccagctgccccgatggtggattcgttaattgcgcgcgtaggagtaatggctcgcggtaatgccattactttgcctgtatgtggtcgggatgtgaagtttactcttgaagtgctccggggtgatagtgttgagaagacctctcgggtatggtcaggtaatgaacgtgaccaggagctgcttactgaggacgcactggatgatctcatcccttcttttctactgactggtcaacagacaccggcgttcggtcgaagagtatctggtgtcatagaaattgccgatgggagtcgccgtcgtaaagctgctgcacttaccgaaagtgattatcgtgttctggttggcgagctggatgatgagcagatggctgcattatccagattgggtaacgattatcgcccaacaagtgcttatgaacgtggtcagcgttatgcaagccgattgcagaatgaatttgctggaaatatttctgcgctggctgatgcggaaaatatttcacgtaagattattacccgctgtatcaacaccgccaaattgcctaaatcagttgttgctcttttttctcaccccggtgaactatctgcccggtcaggtgatgcacttcaaaaagcctttacagataaagaggaattacttaagcagcaggcatctaaccttcatgagcagaaaaaagctggggtgatatttgaagctgaagaagttatcactcttttaacttctgtgcttaaaacgtcatctgcatcaagaactagtttaagctcacgacatcagtttgctcctggagcgacagtattgtataagggcgataaaatggtgcttaacctggacaggtctcgtgttccaactgagtgtatagagaaaattgaggccattcttaaggaacttgaaaagccagcaccctgatgcgaccacgttttagtctacgtttatctgtctttacttaatgtcctttgttacaggccagaaagcataactggcctgaatattctctctgggcccactgttccacttgtatcgtcggtctgataatcagactgggaccacggtcccactcgtatcgtcggtctgattattagtctgggaccacggtcccactcgtatcgtcggtctgattattagtctgggaccacggtcccactcgtatcgtcggtctgataatcagactgggaccacggtcccactcgtatcgtcggtctgattattagtctgggaccatggtcccactcgtatcgtcggtctgattattagtctgggaccacggtcccactcgtatcgtcggtctgattattagtctggaaccacggtcccactcgtatcgtcggtctgattattagtctgggaccacggtcccactcgtatcgtcggtctgattattagtctgggaccacgatcccactcgtgttgtcggtctgattatcggtctgggaccacggtcccacttgtattgtcgatcagactatcagcgtgagactacgattccatcaatgcctgtcaagggcaagtattgacatggtcgtcgtaacctgtagaacggagtaacctcggtgtgcggttgtatgcctgctgtggattgctgctgtgtcctgcttatccacaacattttgcgcacggttatgtggacaaaatacctggttacccaggccgtgccggcacgttaaccgggctgcatccgatgcaagtgtgtcgctgtcgacgagctcgcgagctcggacatgaggttgccccgtattcagtgtcgctgatttgtattgtctgaagttgcttttacgttaagttgatgcagatcaattaatacgatacctgcgtcataattgattatttgacgtggtttgatggcctccacgcacgttgtgatatgtagatgataatcattatcactttacgggtcctttccggtgatccgacaggttacggggcggcgacctcgcgggttttcgctatttatgaaaattttccggtttaaggcgtttccgttcttcttcgtcataacttaatgtttttatttaaaataccctctgaaaagaaaggaaacgacaggtgctgaaagcgagctttttggcctctgtcgtttcctttctctgtttttgtccgtggaatgaacaatggaagtccgagctcatcgctaataacttcgtatagcatacattatacgaagttatattcgatgcggccgatctagcagaaagtcaaaagcctccgaccggaggcttttgacttctgtcacctaggttacgccccgccctgccactcatcgcagtactgttgtaattcattaagcattctgccgacatggaagccatcacaaacggcatgatgaacctgaatcgccagcggcatcagcaccttgtcgccttgcgtataatatttgcccatggtgaaaacgggggcgaagaagttgtccatattggccacgtttaaatcaaaactggtgaaactcacccagggattggctgagacgaaaaacatattctcaataaaccctttagggaaataggccaggttttcaccgtaacacgccacatcttgcgaatatatgtgtagaaactgccggaaatcgtcgtggtattcactccagagcgatgaaaacgtttcagtttgctcatggaaaacggtgtaacaagggtgaacactatcccatatcaccagctcaccgtctttcattgccatacgaaattccggatgagcattcatcaggcgggcaagaatgtgaataaaggccggataaaacttgtgcttatttttctttacggtctttaaaaaggccgtaatatccagctgaacggtctggttataggtacattgagcaactgactgaaatgcctcaaaatgttctttacgatgccattgggatatatcaacggtggtatatccagtgatttttttctccattttagcttccttagctcctgaaaatctcgataactcaaaaaatacgcccggtagtgatcttatttcattatggtgaaagttggaacctcttacgtgccgatcagattaaaacgaaaggcccagtctttcgactgagcctttcgttttatttgaccatgttggtatgatttaaattcagt

SEQ ID NO: 14 - DNA, 18 bp, Artificial Sequence
  T7 promoter
taatacgactcactatag

SEQ ID NO: 15 - DNA, 19 bp, Artificial Sequence
  T7GG promoter
taatacgactcactatagg

SEQ ID NO: 16 - DNA, 20 bp, Artificial Sequence
  T7GGG promoter
taatacgactcactataggg

SEQ ID NO: 17 - DNA, 20 bp, Artificial Sequence
  Forward primer to amplify sg mRNA
aggtttataccttcccaggt

SEQ ID NO: 18 - DNA, 20 bp, Artificial Sequence
  Reverse primer to amplify sg mRNA
tttgtattcagcccatagcg

SEQ ID NO: 19 - DNA, 20 bp, Artificial Sequence
  Forward primer to amplify beta-actin
gagcacagagcctcgccttt

SEQ ID NO: 20 - DNA, 20 bp, Artificial Sequence
  Reverse primer to amplify beta-actin
tggggtacttcagggtgagg

SEQ ID NO: 21 - DNA, 85 bp, Artificial Sequence
  Forward primer to amplify ampicillin (Amp) cassette fragment
tttgtgaatgagttttacgcatatttgcgtaaacatttctcaatgatgatactctctggcgcgccggaacccctatttgtttatt

SEQ ID NO: 22 - DNA, 85 bp, Artificial Sequence
  Reverse primer to amplify Amp cassette fragment
catcttaatgaagtctgtgaattgcaaagaacacaagccccaacagcctgtaagactggcgcgccttaccaatgcttaatcagtg

SEQ ID NO: 23 - DNA, 56 bp, Artificial Sequence
  Forward primer to amplify RdRp
cgtaaacatttctcaatgatgatactctctaacaatgctgttgtgtgtttcaatag

SEQ ID NO: 24 - DNA, 53 bp, Artificial Sequence
  Reverse primer to amplify RdRp
caaagaacacaagccccaacagcctgtaagactgtatgcggtgtgtacatagc

SEQ ID NO: 25 - DNA, 47 bp, Artificial Sequence
  Forward promoter to amplify CMV promoter
tcgttttatttgaccatgttggtatgatttcgcatcagattggctat

SEQ ID NO: 26 - DNA, 50 bp, Artificial Sequence
  Reverse promoter to amplify CMV promoter
gtgagtcgtattagcggccgcactgaatttgtacttacgtcactcttggc

SEQ ID NO: 27 - RNA, 30119 nt, MERS HCoV-EMC/2012
gauuuaagugaauagcuuggcuaucucacuuccccucguucucuugcagaacuuugauuuuaacgaacuuaaauaaaagcccuguuguuuagcguaucguugcacuugucuggugggauuguggcauuaauuugccugcucaucuaggcaguggacauaugcucaacacuggguauaauucuaauugaauacuauuuuucaguuagagcgucgugucucuuguacgucucggucacaauacacgguuucguccggugcguggcaauucggggcacaucaugucuuucguggcuggugugaccgcgcaaggugcgcgcgguacguaucgagcagcgcucaacucugaaaaacaucaagaccaugugucucuaacugugccacucugugguucaggaaaccugguugaaaaacuuucaccaugguucauggauggcgaaaaugccuaugaaguggugaaggccauguuacuuaaaaaggagccacuucucuaugugcccauccggcuggcuggacacacuagacaccucccagguccucguguguaccugguugagaggcucauugcuugugaaaauccauucaugguuaaccaauuggcuuauagcucuagugcaaauggcagccugguuggcacaacuuugcagggcaagccuauugguauguucuucccuuaugacaucgaacuugucacaggaaagcaaaauauucuccugcgcaaguauggccguggugguuaucacuacaccccauuccacuaugagcgagacaacaccucuugcccugaguggauggacgauuuugaggcggauccuaaaggcaaauaugcccagaaucugcuuaagaaguugauuggcggugaugucacuccaguugaccaauacauguguggcguugauggaaaacccauuagugccuacgcauuuuuaauggccaaggauggaauaaccaaacuggcugauguugaagcggacgucgcagcacgugcugaugacgaaggcuucaucacauuaaagaacaaucuauauagauugguuuggcauguugagcguaaagacguuccauauccuaagcaaucuauuuuuacuauuaauagugugguccaaaaggaugguguugaaaacacuccuccucacuauuuuacucuuggaugcaaaauuuuaacgcucaccccacgcaacaaguggaguggcguuucugacuugucccucaaacaaaaacuccuuuacaccuucuaugguaaggagucacuugagaacccaaccuacauuuaccacuccgcauucauugaguguggaaguugugguaaugauuccuggcuuacagggaaugcuauccaaggguuugccuguggauguggggcaucauauacagcuaaugaugucgaaguccaaucaucuggcaugauuaagccaaaugcucuucuuugugcuacuugccccuuugcuaagggugauagcuguucuucuaauugcaaacauucaguugcucaguugguuaguuaccuuucugaacgcuguaauguuauugcugauucuaaguccuucacacuuaucuuugguggcguagcuuacgccuacuuuggaugugaggaagguacuauguacuuugugccuagagcuaagucuguugucucaaggauuggagacuccaucuuuacaggcuguacuggcucuuggaacaaggucacucaaauugcuaacauguucuuggaacagacucagcauucccuuaacuuugugggagaguucguugucaacgauguuguccucgcaauucucucuggaaccacaacuaauguugacaaaauacgccagcuucucaaaggugucacccuugacaaguugcgugauuauuuagcugacuaugacguagcagucacugccggcccauucauggauaaugcuauuaauguuggugguacaggauuacaguaugccgccauuacugcaccuuauguaguucucacuggcuuaggugaguccuuuaagaaaguugcaaccauaccguauaagguuugcaacucuguuaaggauacucuggcuuauuaugcucacagcguguuguacagaguuuuuccuuaugacauggauucuggugugucauccuuuagugaacuacuuuuugauugcguugaucuuucaguagcuucuaccuauuuuuuaguccgcaucuugcaagauaagacuggcgacuuuaugucuacaauuauuacuuccugccaaacugcuguuaguaagcuucuagauacauguuuugaagcuacagaagcaacauuuaacuucuuguuagauuuggcaggauuguucagaaucuuucuccgcaaugccuauguguacacuucacaaggguuugugguggucaauggcaaaguuucuacacuugucaaacaaguguuagacuugcuuaauaaggguaugcaacuuuugcauacaaaggucuccugggcugguucuaaaaucauugcuguuaucuacagcggcagggagucucuaauauucccaucgggaaccuauuacugugucaccacuaaggcuaaguccguucaacaagaucuugacguuauuuugccuggugaguuuuccaagaagcaguuaggacugcuccaaccuacugacaauucuacaacuguuaguguuacuguauccaguaacaugguugaaacuguugugggucaacuugagcaaacuaauaugcauaguccugauguuauaguaggugacuaugucauuauuagugaaaaauuguuugugcguaguaaggaagaagacggauuugccuucuacccugcuugcacuaauggucaugcuguaccgacucucuuuagacuuaagggaggugcaccuguaaaaaaaguagccuuuggcggugaucaaguacaugagguugcugcuguaagaaguguuacugucgaguacaacauucaugcuguauuagacacacuacuugcuucuucuagucuuagaaccuuuguuguagauaagucuuugucaauugaggaguuugcugacguaguaaaggaacaagucucagacuugcuuguuaaauuacugcguggaaugccgauuccagauuuugauuuagacgauuuuauugacgcaccaugcuauugcuuuaacgcugagggugaugcauccuggucuucuacuaugaucuucucucuucaccccgucgagugugacgaggaguguucugaaguagaggcuucagauuuagaagaaggugaaucagagugcauuucugagacuucaacugaacaaguugacguuucucaugagacuucugacgacgagugggcugcugcaguugaugaagcguucccucucgaugaagcagaagauguuacugaaucugugcaagaagaagcacaaccaguagaaguaccuguugaagauauugcgcagguugucauagcugacaccuuacaggaaacuccuguugugccugauacuguugaagucccaccgcaaguggugaaacuuccgucugcaccucagacuauccagcccgagguaaaagaaguugcaccugucuaugaggcugauaccgaacagacacagaauguuacuguuaaaccuaagagguuacgcaaaaagcguaauguugacccuuuguccaauuuugaacauaagguuauuacagagugcguuaccauaguuuuaggugacgcaauucaaguagccaagugcuauggggagucuguguuaguuaaugcugcuaacacacaucuuaagcauggcggugguaucgcuggugcuauuaaugcggcuucaaaaggggcuguccaaaaagagucagaugaguauauucuggcuaaagggccguuacaaguaggagauucaguucucuugcaaggccauucucuagcuaagaauauccugcaugucguaggcccagaugcccgcgcuaaacaggauguuucucuccuuaguaagugcuauaaggcuaugaaugcauauccucuuguagucacuccucuuguuucagcaggcauauuugguguaaaaccagcugugucuuuugauuaucuuauuagggaggcuaagacuagaguuuuagucgucguuaauucccaagaugucuauaagagucuuaccauaguugacauuccacagaguuugacuuuuucauaugauggguuacguggcgcaauacguaaagcuaaagauuaugguuuuacuguuuuugugugcacagacaacucugcuaacacuaaaguucuuaggaacaaggguguugauuauacuaagaaguuucuuacaguugacggugugcaauauuauugcuacacgucuaaggacacuuuagaugauaucuuacaacaggcuaauaagucuguugguauuauaucuaugccuuugggauaugugucucaugguuuagacuuaaugcaagcagggagugucgugcguagaguuaacgugcccuacgugugucuccuagcuaauaaagagcaagaagcuauuuugaugucugaagacguuaaguuaaacccuucagaagauuuuauaaagcacguccgcacuaauggugguuacaauucuuggcauuuagucgagggugaacuauuggugcaagacuuacgcuuaaauaagcuccugcauuggucugaucaaaccauaugcuacaaggauaguguguuuuauguuguaaagaauaguacagcuuuuccauuugaaacacuuucagcaugucgugcguauuuggauucacgcacgacacagcaguuaacaaucgaagucuuagugacugucgaugguguaaauuuuagaacagucguucuaaauaauaagaacacuuauagaucacagcuuggaugcguuuucuuuaauggugcugauauuucugacaccauuccugaugagaaacagaauggucacaguuuauaucuagcagacaauuugacugcugaugaaacaaaggcgcuuaaagaguuauauggccccguugauccuacuuucuuacacagauucuauucacuuaaggcugcaguccauggguggaagaugguugugugugauaagguacguucucucaaauugagugauaauaauuguuaucuuaaugcaguuauuaugacacuugauuuauugaaggacauuaaauuuguuauaccugcucuacagcaugcauuuaugaaacauaagggcggugauucaacugacuucauagcccucauuauggcuuauggcaauugcacauuuggugcuccagaugaugccucucgguuacuucauaccgugcuugcaaaggcugaguuaugcuguucugcacgcaugguuuggagagaguggugcaaugucuguggcauaaaagauguuguucuacaaggcuuaaaagcuuguuguuacgugggugugcaaacuguugaagaucugcgugcucgcaugacauauguaugccagugugguggugaacgucaucggcaauuagucgaacacaccacccccugguugcugcucucaggcacaccaaaugaaaaauuggugacaaccuccacggcgccugauuuuguagcauuuaaugucuuucagggcauugaaacggcuguuggccauuauguucaugcucgccugaaggguggucuuauuuuaaaguuugacucuggcaccguuagcaagacuucagacuggaagugcaaggugacagauguacuuuuccccggccaaaaauacaguagcgauuguaaugucguacgguauucuuuggacgguaauuucagaacagagguugaucccgaccuaucugcuuucuauguuaaggaugguaaauacuuuacaagugaaccacccguaacauauucaccagcuacaauuuuagcugguagugucuacacuaauagcugccuuguaucgucugauggacaaccuggcggugaugcuauuaguuugaguuuuaauaaccuuuuaggguuugauucuaguaaaccagucacuaagaaauacacuuacuccuucuugccuaaagaagacggcgauguguuguuggcugaguuugacacuuaugacccuauuuauaagaauggugccauguauaaaggcaaaccaauucuuugggucaauaaagcaucuuaugauacuaaucuuaauaaguucaauagagcuaguuugcgucaaauuuuugacguagcccccauugaacucgaaaauaaauucacaccuuugaguguggagucuacaccaguugaaccuccaacuguagaugugguagcacuucaacaggaaaugacaauugucaaauguaaggguuuaaauaaaccuuucgugaaggacaaugucaguuucguugcugaugauucagguacucccguuguugaguaucugucuaaagaagaccuacauacauuguauguagacccuaaguaucaagucauugucuuaaaagacaauguacuuucuucuaugcuuagauugcacaccguugagucaggugauauuaacguuguugcagcuuccggaucuuugacacguaaagugaaguuacuauuuagggcuucauuuuauuucaaagaauuugcuacccgcacuuucacugcuaccacugcuguagguaguuguauaaagaguguagugcggcaucuagguguuacuaaaggcauauugacaggcuguuuuaguuuugccaagauguuauuuaugcuuccacuagcuuacuuuagugauucaaaacucggcaccacagagguuaaagugagugcuuugaaaacagccggcguugugacagguaauguuguaaaacaguguugcacugcugcuguugauuuaaguauggauaaguugcgccguguggauuggaaaucaacccuacgguuguuacuuauguuaugcacaacuaugguauuguugucuucuguguaucacuuguaugucuucaaucaggucuuaucaagugauguuauguuugaagaugcccaagguuugaaaaaguucuacaaagaaguuagagcuuaccuaggaaucucuucugcuugugacggucuugcuucagcuuauagggcgaauuccuuugauguaccuacauucugcgcaaaccguucugcaauguguaauuggugcuugauuagccaagauuccauaacucacuacccagcucuuaagaugguucaaacacaucuuagccacuauguucuuaacauagauugguugugguuugcauuugagacugguuuggcauacaugcucuauaccucggccuucaacugguuguuguuggcagguacauugcauuauuucuuugcacagacuuccauauuuguagacuggcggucauacaauuaugcugugucuagugccuucugguuauucacccacauuccaauggcggguuugguacgaauguauaauuuguuagcaugccuuuggcuuuuacgcaaguuuuaucagcauguaaucaaugguugcaaagauacggcaugcuugcucugcuauaagaggaaccgacuuacuagaguugaagcuucuaccguugucugugguggaaaacguacguuuuauaucacagcaaauggcgguauuucauucugucguaggcauaauuggaauuguguggauugugacacugcagguguggggaauaccuucaucugugaagaagucgcaaaugaccucacuaccgcccuacgcaggccuauuaacgcuacggauagaucacauuauuauguggauuccguuacaguuaaagagacuguuguucaguuuaauuaucguagagacggucaaccauucuacgagcgguuuccccucugcgcuuuuacaaaucuagauaaguugaaguucaaagaggucuguaaaacuacuacugguauaccugaauacaacuuuaucaucuacgacucaucagaucguggccaggaaaguuuagcuaggucugcauguguuuauuauucucaagucuuguguaaaucaauucuuuugguugacucaaguuugguuacuucuguuggugauucuagugaaaucgccacuaaaauguuugauuccuuuguuaauaguuucgucucgcuguauaaugucacacgcgauaaguuggaaaaacuuaucucuacugcucgugauggcguaaggcgaggcgauaacuuccauagugucuuaacaacauucauugacgcagcacgaggccccgcagguguggagucugauguugagaccaaugaaauuguugacucugugcaguaugcucauaaacaugacauacaaauuacuaaugagagcuacaauaauuauguacccucauauguuaaaccugauagugugucuaccagcgauuuagguagucucauugauuguaaugcggcuucaguuaaccaaauugucuugcguaauucuaauggugcuugcauuuggaacgcugcugcauauaugaaacucucggaugcacuuaaacgacagauucgcauugcaugccguaaguguaauuuagcuuuccgguuaaccaccucaaagcuacgcgcuaaugauaauaucuuaucaguuagauucacugcuaacaaaauuguugguggugcuccuacaugguuuaaugcguugcgugacuuuacguuaaaggguuauguucuugcuaccauuauuguguuucugugugcuguacugauguauuuguguuuaccuacauuuucuauggcaccuguugaauuuuaugaagaccgcaucuuggacuuuaaaguucuugauaaugguaucauuagggauguaaauccugaugauaagugcuuugcuaauaagcaccgguccuucacacaaugguaucaugagcauguugguggugucuaugacaacucuaucacaugcccauugacaguugcaguaauugcuggaguugcuggugcucgcauuccagacguaccuacuacauuggcuugggugaacaaucagauaauuuucuuuguuucucgagucuuugcuaauacaggcaguguuugcuacacuccuauagaugagauacccuauaagaguuucucugauagugguugcauucuuccaucugagugcacuauguuuagggaugcagagggccguaugacaccauacugccaugauccuacuguuuugccuggggcuuuugcguacagucagaugaggccucauguucguuacgacuuguaugaugguaacauguuuauuaaauuuccugaaguaguauuugaaaguacacuuaggauuacuagaacucugucaacucaguacugccgguucgguaguugugaguaugcacaagaggguguuuguauuaccacaaauggcucgugggccauuuuuaaugaccaccaucuuaauagaccuggugucuauuguggcucugauuuuauugacauugucaggcgguuagcaguaucacuguuccagccuauuacuuauuuccaauugacuaccucauuggucuuggguauagguuugugugcguuccugacuuugcucuucuauuauauuaauaaaguaaaacgugcuuuugcagauuacacccagugugcuguaauugcuguuguugcugcuguucuuaauagcuugugcaucugcuuuguuaccucuauaccauuguguauaguaccuuacacugcauuguacuauuaugcuacauucuauuuuacuaaugagccugcauuuauuaugcauguuucuugguacauuauguucgggccuaucguucccauauggaugaccugcgucuauacaguugcaaugugcuuuagacacuucuucuggguuuuagcuuauuuuaguaagaaacauguagaaguuuuuacugaugguaagcuuaauuguaguuuccaggacgcugccucuaauaucuuuguuauuaacaaggacacuuaugcagcucuuagaaacucuuuaacuaaugaugccuauucacgauuuuugggguuguuuaacaaguauaaguacuucucuggugcuauggaaacagccgcuuaucgugaagcugcagcaugucaucuugcuaaagccuuacaaacauacagcgagacugguagugaucuucuuuaccaaccacccaacuguagcauaaccucuggcguguugcaaagcgguuuggugaaaaugucacaucccaguggagauguugaggcuuguaugguucagguuaccugcgguagcaugacucuuaauggucuuuggcuugacaacacagucuggugcccacgacacguaaugugcccggcugaccaguugucugauccuaauuaugaugccuuguugauuucuaugacuaaucauaguuucagugugcaaaaacacauuggcgcuccagcaaacuugcguguuguuggucaugccaugcaaggcacucuuuugaaguugacugucgauguugcuaacccuagcacuccagccuacacuuuuacaacagugaaaccuggcgcagcauuuaguguguuagcaugcuauaauggucguccgacugguacauucacuguuguaaugcgcccuaacuacacaauuaaggguuccuuucugugugguucuugugguaguguugguuacaccaaggaggguagugugaucaauuucuguuacaugcaucaaauggaacuugcuaaugguacacauaccgguucagcauuugaugguacuauguauggugccuuuauggauaaacaagugcaccaaguucaguuaacagacaaauacugcaguguuaauguaguagcuuggcuuuacgcagcaauacuuaaugguugcgcuugguuuguaaaaccuaaucgcacuaguguuguuucuuuuaaugaaugggcucuugccaaccaauucacugaauuuguuggcacucaauccguugacauguuagcugucaaaacaggcguugcuauugaacagcugcuuuaugcgauccaacaacuguauacuggguuccagggaaagcaaauccuuggcaguaccauguuggaagaugaauucacaccugaggauguuaauaugcagauuaugggugugguuaugcagaguggugugagaaaaguuacauaugguacugcgcauugguuguuugcgacccuugucucaaccuaugugauaaucuuacaagccacuaaauuuacuuuguggaacuacuuguuugagacuauucccacacaguuguucccacucuuauuugugacuauggccuucguuauguuguugguuaaacacaaacacaccuuuuugacacuuuucuuguugccuguggcuauuuguuugacuuaugcaaacauagucuacgagcccacuacucccauuucgucagcgcugauugcaguugcaaauuggcuugcccccacuaaugcuuauaugcgcacuacacauacugauauuggugucuacauuaguaugucacuuguauuagucauuguagugaagagauuguacaacccaucacuuucuaacuuugcguuagcauugugcagugguguaaugugguuguacacuuauagcauuggagaagccucaagccccauugccuaucugguuuuugucacuacacucacuagugauuauacgauuacagucuuuguuacugucaaccuugcaaaaguuugcacuuaugccaucuuugcuuacucaccacagcuuacacuuguguuuccggaagugaagaugauacuuuuauuauacacauguuuagguuucauguguacuugcuauuuuggugucuucucucuuuugaaccuuaagcuuagagcaccuaugggugucuaugacuuuaaggucucaacacaagaguucagauucaugacugcuaacaaucuaacugcaccuagaaauucuugggaggcuauggcucugaacuuuaaguuaauagguauuggcgguacaccuuguauaaagguugcugcuaugcagucuaaacuuacagaucuuaaaugcacaucugugguucuccucucugugcuccaacaguuacacuuagaggcuaauaguagggccugggcuuucuguguuaaaugccauaaugauauauuggcagcaacagaccccagugaggcuuucgagaaauucguaagucucuuugcuacuuuaaugacuuuuucugguaauguagaucuugaugcguuagcuagugauauuuuugacacuccuagcguacuucaagcuacucuuucugaguuuucacacuuagcuaccuuugcugaguuggaagcugcgcagaaagccuaucaggaagcuauggacucuggugacaccucaccacaaguucuuaaggcuuugcagaaggcuguuaauauagcuaaaaacgccuaugagaaggauaaggcaguggcccguaaguuagaacguauggcugaucaggcuaugacuucuauguauaagcaagcacgugcugaagacaagaaagcaaaaauugucagugcuaugcaaacuauguuguuugguaugauuaagaagcucgacaacgauguucuuaaugguaucauuucuaacgcuaggaaugguuguauaccucuuagugucaucccacugugugcuucaaauaaacuucgcguuguaauuccugacuucaccgucuggaaucagguagucacauaucccucgcuuaacuacgcuggggcuuugugggacauuacaguuauaaacaauguggacaaugaaauuguuaagucuucagauguuguagacagcaaugaaaauuuaacauggccacuuguuuuagaaugcacuagggcauccacuucugccguuaaguugcaaaauaaugagaucaaaccuucaggucuaaaaaccaugguugugucugcgggucaagagcaaacuaacuguaauacuaguuccuuagcuuauuacgaaccugugcagggucguaaaaugcugauggcucuucuuucugauaaugccuaucucaaaugggcgcguguugaagguaaggacggauuugucaguguagagcuacaaccuccuugcaaauucuugauugcgggaccaaaaggaccugaaauccgauaucucuauuuuguuaaaaaucuuaacaaccuucaucgcgggcaaguguuagggcacauugcugcgacuguuagauugcaagcugguucuaacaccgaguuugccucuaauuccucgguguugucacuuguuaacuucaccguugauccucaaaaagcuuaucucgauuucgucaaugcgggaggugccccauugacaaauuguguuaagaugcuuacuccuaaaacugguacagguauagcuauaucuguuaaaccagagaguacagcugaucaagagacuuaugguggagcuucagugugucucuauugccgugcgcauauagaacauccugaugucucugguguuuguaaauauaaggguaaguuuguccaaaucccugcucaguguguccgugacccugugggauuuuguuugucaaauacccccuguaaugucugucaauauuggauuggauaugggugcaauugugacucgcuuaggcaagcagcacugccccaaucuaaagauuccaauuuuuuaaacgaguccgggguucuauuguaaaugcccgaauagaacccuguucaagugguuuguccacugaugucgucuuuagggcauuugacaucugcaacuauaaggcuaagguugcugguauuggaaaauacuacaagacuaauacuuguagguuuguagaauuagaugaccaagggcaucauuuagacuccuauuuugucguuaagaggcauacuauggagaauuaugaacuagagaagcacuguuacgacuuguuacgugacugugaugcuguagcuccccaugauuucuucaucuuugauguagacaaaguuaaaacaccucauauuguacgucagcguuuaacugaguacacuaugauggaucuuguauaugcccugaggcacuuugaucaaaauagcgaagugcuuaaggcuaucuuagugaaguaugguugcugugauguuaccuacuuugaaaauaaacucugguuugauuuuguugaaaaucccaguguuauugguguuuaucauaaacuuggagaacguguacgccaagcuaucuuaaacacuguuaaauuuugugaccacauggucaaggcugguuuagucggugugcucacacuagacaaccaggaccuuaauggcaagugguaugauuuuggugacuucguaaucacucaaccugguucaggaguagcuauaguugauagcuacuauucuuauuugaugccugugcucucaaugaccgauugucuggccgcugagacacauagggauugugauuuuaauaaaccacucauugaguggccacuuacugaguaugauuuuacugauuauaagguacaacucuuugagaaguacuuuaaauauugggaucagacguaucacgcaaauugcguuaauuguacugaugaccguuguguguuacauugugcuaauuucaauguauuguuugcuaugaccaugccuaagacuuguuucggacccauaguccgaaagaucuuuguugauggcgugccauuuguaguaucuugugguuaucacuacaaagaauuagguuuagucaugaauauggauguuagucuccauagacauaggcucucucuuaaggaguugaugauguaugccgcugauccagccaugcacauugccuccucuaacgcuuuucuugauuugaggacaucauguuuuagugucgcugcacuuacaacugguuugacuuuucaaacugugcggccuggcaauuuuaaccaagacuucuaugauuucgugguaucuaaagguuucuuuaaggagggcucuucagugacgcucaaacauuuuuucuuugcucaagaugguaaugcugcuauuacagauuauaauuacuauucuuauaaucugccuacuaugugugacaucaaacaaauguuguucugcauggaaguuguaaacaaguacuucgaaaucuaugacggugguugucuuaaugcuucugaagugguuguuaauaauuuagacaagagugcuggccauccuuuuaauaaguuuggcaaagcucgugucuauuaugagagcaugucuuaccaggagcaagaugaacuuuuugccaugacaaagcguaacgucauuccuaccaugacucaaaugaaucuaaaauaugcuauuagugcuaagaauagagcucgcacuguugcaggcguguccauacuuagcacaaugacuaaucgccaguaccaucagaaaaugcuuaaguccauggcugcaacucguggagcgacuugcgucauugguacuacaaaguucuacgguggcugggauuucaugcuuaaaacauuguacaaagauguugauaauccgcaucuuauggguugggauuacccuaagugugauagagcuaugccuaauauguguagaaucuucgcuucacucauauuagcucguaaacauggcacuuguuguacuacaagggacagauuuuaucgcuuggcaaaugagugugcucaggugcuaagcgaauauguucuaugugguggugguuacuacgucaaaccuggagguaccaguagcggagaugccaccacugcauaugccaauagugucuuuaacauuuugcaggcgacaacugcuaaugucagugcacuuaugggugcuaauggcaacaagauuguugacaaagaaguuaaagacaugcaguuugauuuguaugucaauguuuacaggagcacuagcccagaccccaaauuuguugauaaauacuaugcuuuucuuaauaagcacuuuucuaugaugauacugucugaugacggugucguuugcuauaauagugauuaugcagcuaaggguuacauugcuggaauacagaauuuuaaggaaacgcuguauuaucagaacaaugucuuuaugucugaagcuaaaugcuggguggaaaccgaucugaagaaagggccacaugaauucuguucacagcauacgcuuuauauuaaggauggcgacgaugguuacuuccuuccuuauccagacccuucaagaauuuugucugccgguugcuuuguagaugauaucguuaagacugacgguacacucaugguagagcgguuugugucuuuggcuauagaugcuuacccucucacaaagcaugaagauauagaauaccagaauguauucugggucuacuuacaguauauagaaaaacuguauaaagaccuuacaggacacaugcuugacaguuauucugucaugcuauguggugauaauucugcuaaguuuugggaagaggcauucuauagagaucucuauaguucgccuaccacuuugcaggcugucgguucaugcguuguaugccauucacagacuucccuacgcugugggacaugcauccguagaccauuucucugcuguaaaugcugcuaugaucauguuauagcaacuccacauaagaugguuuugucuguuucuccuuacguuuguaaugccccugguuguggcguuucagacguuacuaagcuauauuuaggugguaugagcuacuuuuguguagaucauagaccuguguguaguuuuccacuuugcgcuaauggucuuguauucggcuuauacaagaauaugugcacagguaguccuucuauaguugaauuuaauagguuggcuaccugugacuggacugaaaguggugauuacacccuugccaauacuacaacagaaccacucaaacuuuuugcugcugagacuuuacgugccacugaagaggcgucuaagcagucuuaugcuauugccaccaucaaagaaauuguuggugagcgccaacuauuacuugugugggaggcuggcaaguccaaaccaccacucaaucguaauuauguuuuuacugguuaucauauaaccaaaaauaguaaagugcagcucggugaguacauuuucgagcgcauugauuauagugaugcuguauccuacaagucuaguacaacguauaaacugacuguaggugacaucuucguacuuaccucucacucuguggcuaccuugacggcgcccacaauugugaaucaagagagguauguuaaaauuacuggguuguacccaaccauuacgguaccugaagaguucgcaagucauguugccaacuuccaaaaaucagguuauaguaaauaugucacuguucagggaccaccuggcacuggcaaaagucauuuugcuauaggguuagcgauuuacuacccuacagcacguguuguuuauacagcauguucacacgcagcuguugaugcuuugugugaaaaagcuuuuaaauauuugaacauugcuaaauguucccguaucauuccugcaaaggcacguguugagugcuaugacagguuuaaaguuaaugagacaaauucucaauauuuguuuaguacuauuaaugcucuaccagaaacuucugccgauauucuggugguugaugagguuaguaugugcacuaauuaugaucuuucaauuauuaaugcacguauuaaagcuaagcacauugucuauguaggagauccagcacaguugccagcuccuaggacuuuguugacuagaggcacauuggaaccagaaaauuucaauagugucacuagauugauguguaacuuagguccugacauauuuuuaaguaugugcuacagguguccuaaggaaauaguaagcacugugagcgcucuugucuacaauaauaaauuguuagccaagaaggagcuuucaggccagugcuuuaaaauacucuauaagggcaaugugacgcaugaugcuagcucugccauuaauagaccacaacucacauuugugaagaauuuuauuacugccaauccggcauggaguaaggcagucuuuauuucgccuuacaauucacagaaugcugugucucguucaaugcugggucuuaccacucagacuguugauuccucacaggguucagaauaccaguacguuaucuucugucaaacagcagauacggcacaugcuaacaacauuaacagauuuaauguugcaaucacucgugcccaaaaagguauucuuuguguuaugacaucucaggcacucuuugaguccuuagaguuuacugaauugucuuuuacuaauuacaagcuccagucucagauuguaacuggccuuuuuaaagauugcucuagagaaacuucuggccucucaccugcuuaugcaccaacauauguuaguguugaugacaaguauaagacgagugaugagcuuugcgugaaucuuaauuuacccgcaaaugucccauacucucguguuauuuccaggaugggcuuuaaacucgaugcaacaguuccuggauauccuaagcuuuucauuacucgugaagaggcuguaaggcaaguucgaagcuggauaggcuucgauguugagggugcucaugcuucccguaaugcauguggcaccaaugugccucuacaauuaggauuuucaacuggugugaacuuuguuguucagccaguugguguuguagacacugagugggguaacauguuaacgggcauugcugcacguccuccaccaggugaacaguuuaagcaccucgugccucuuaugcauaagggggcugcguggccuauuguuagacgacguauagugcaaauguugucagacacuuuagacaaauugucugauuacuguacguuuguuuguugggcucauggcuuugaauuaacgucugcaucauacuuuugcaagauagguaaggaacagaaguguugcaugugcaauagacgcgcugcagcguacucuucaccucugcaaucuuaugccugcuggacucauuccugcgguuaugauuaugucuacaacccuuucuuugucgauguucaacagugggguuauguaggcaaucuugcuacuaaucacgaucguuauugcucuguccaucaaggagcucauguggcuucuaaugaugcaauaaugacucguuguuuagcuauucauucuuguuuuauagaacguguggauugggauauagaguauccuuauaucucacaugaaaagaaauugaauuccuguuguagaaucguugagcgcaacgucguacgugcugcucuucuugccgguucauuugacaaagucuaugauauuggcaauccuaaaggaauuccuauuguugaugacccugugguugauuggcauuauuuugaugcacagcccuugaccaggaagguacaacagcuuuucuauacagaggacauggccucaagauuugcugaugggcucugcuuauuuuggaacuguaauguaccaaaauauccuaauaaugcaauuguaugcagguuugacacacgugugcauucugaguucaauuugccagguugugauggcgguaguuuguauguuaacaagcacgcuuuucauacaccagcauaugaugugagugcauuccgugaucugaaaccuuuaccauucuuuuauuauucuacuacaccaugugaagugcaugguaaugguaguaugauagaggauauugauuauguaccccuaaaaucugcagucuguauuacagcuuguaauuuagggggcgcuguuuguaggaagcaugcuacagaguacagagaguauauggaagcauauaaucuugucucugcaucagguuuccgccuuugguguuauaagaccuuugauauuuauaaucucuggucuacuuuuacaaaaguucaagguuuggaaaacauugcuuuuaauguuguuaaacaaggccauuuuauugguguugagggugaacuaccuguagcuguagucaaugauaagaucuucaccaagaguggcguuaaugacauuuguauguuugagaauaaaaccacuuugccuacuaauauagcuuuugaacucuaugcuaagcgugcuguacgcucgcaucccgauuucaaauugcuacacaauuuacaagcagacauuugcuacaaguucguccuuugggauuaugaacguagcaauauuuaugguacugcuacuauugguguauguaaguacacugauauugauguuaauucagcuuugaauauauguuuugacauacgcgauaauuguucauuggagaaguucaugucuacucccaaugccaucuuuauuucugauagaaaaaucaagaaauacccuuguaugguagguccugauuaugcuuacuucaauggugcuaucauccgugauagugauguuguuaaacaaccagugaaguucuacuuguauaagaaagucaauaaugaguuuauugauccuacugaguguauuuacacucagagucgcucuuguagugacuuccuaccccuuucugacauggagaaagacuuucuaucuuuugauagugauguuuucauuaagaaguauggcuuggaaaacuaugcuuuugagcacguagucuauggagacuucucucauacuacguuaggcggucuucacuugcuuauugguuuauacaagaagcaacaggaaggucauauuauuauggaagaaaugcuaaaagguagcucaacuauucauaacuauuuuauuacugagacuaacacagcggcuuuuaaggcgguguguucuguuauagauuuaaagcuugacgacuuuguuaugauuuuaaagagucaagaccuuggcguaguauccaagguugucaagguuccuauugacuuaacaaugauugaguuuauguuaugguguaaggauggacagguucaaaccuucuacccucgacuccaggcuucugcagauuggaaaccuggucaugcaaugccaucccucuuuaaaguucaaaauguaaaccuugaacguugugagcuugcuaauuacaagcaaucuauuccuaugccucgcggugugcacaugaacaucgcuaaauauaugcaauugugccaguauuuaaauacuugcacauuagccgugccugccaauaugcguguuauacauuuuggcgcugguucugauaaagguaucgcuccugguaccucaguuuuacgacaguggcuuccuacagaugccauuauuauagauaaugauuuaaaugaguucgugucagaugcugacauaacuuuauuuggagauuguguaacuguacgugucggccaacaaguggaucuuguuauuuccgacauguaugauccuacuacuaagaauguaacagguaguaaugagucaaaggcuuuauucuuuacuuaccuguguaaccucauuaauaauaaucuugcucuuggugggucuguugcuauuaaaauaacagaacacucuuggagcguugaacuuuaugaacuuaugggaaaauuugcuugguggacuguuuucugcaccaaugcaaaugcauccucaucugaaggauuccucuuagguauuaauuacuuggguacuauuaaagaaaauauagaugguggugcuaugcacgccaacuauauauuuuggagaaauuccacuccuaugaaucugaguacuuacucacuuuuugauuuauccaaguuucaauuaaaauuaaaaggaacaccaguucuucaauuaaaggagagucaaauuaacgaacucguaauaucucuccugucgcaggguaaguuacuuauccgugacaaugauacacucaguguuucuacugauguucuuguuaacaccuacagaaaguuacguugauguagggccagauucuguuaagucugcuuguauugagguugauauacaacagacuuucuuugauaaaacuuggccuaggccaauugauguuucuaaggcugacgguauuauauacccucaaggccguacauauucuaacauaacuaucacuuaucaaggucuuuuucccuaucagggagaccauggugauauguauguuuacucugcaggacaugcuacaggcacaacuccacaaaaguuguuuguagcuaacuauucucaggacgucaaacaguuugcuaauggguuugucguccguauaggagcagcugccaauuccacuggcacuguuauuauuagcccaucuaccagcgcuacuauacgaaaaauuuacccugcuuuuaugcuggguucuucaguugguaauuucucagaugguaaaaugggccgcuucuucaaucauacucuaguucuuuugcccgauggauguggcacuuuacuuagagcuuuuuauuguauucuagagccucgcucuggaaaucauuguccugcuggcaauuccuauacuucuuuugccacuuaucacacuccugcaacagauuguucugauggcaauuacaaucguaaugccagucugaacucuuuuaaggaguauuuuaauuuacguaacugcaccuuuauguacacuuauaacauuaccgaagaugagauuuuagagugguuuggcauuacacaaacugcucaagguguucaccucuucucaucucgguauguugauuuguacggcggcaauauguuucaauuugccaccuugccuguuuaugauacuauuaaguauuauucuaucauuccucacaguauucguucuauccaaagugauagaaaagcuugggcugccuucuacguauauaaacuucaaccguuaacuuuccuguuggauuuuucuguugaugguuauauacgcagagcuauagacugugguuuuaaugauuugucacaacuccacugcucauaugaauccuucgauguugaaucuggaguuuauucaguuucgucuuucgaagcaaaaccuucuggcucaguuguggaacaggcugaagguguugaaugugauuuuucaccucuucugucuggcacaccuccucagguuuauaauuucaagcguuugguuuuuaccaauugcaauuauaaucuuaccaaauugcuuucacuuuuuucugugaaugauuuuacuuguagucaaauaucuccagcagcaauugcuagcaacuguuauucuucacugauuuuggauuacuuuucauacccacuuaguaugaaauccgaucucaguguuaguucugcugguccaauaucccaguuuaauuauaaacaguccuuuucuaaucccacauguuugauuuuagcgacuguuccucauaaccuuacuacuauuacuaagccucuuaaguacagcuauauuaacaagugcucucgucuucuuucugaugaucguacugaaguaccucaguuagugaacgcuaaucaauacucacccuguguauccauugucccauccacugugugggaagacggugauuauuauaggaaacaacuaucuccacuugaaggugguggcuggcuuguugcuaguggcucaacuguugccaugacugagcaauuacagaugggcuuugguauuacaguucaauaugguacagacaccaauaguguuugccccaagcuugaauuugcuaaugacacaaaaauugccucucaauuaggcaauugcguggaauauucccucuaugguguuucgggccgugguguuuuucagaauugcacagcuguagguguucgacagcagcgcuuuguuuaugaugcguaccagaauuuaguuggcuauuauucugaugauggcaacuacuacuguuugcgugcuuguguuaguguuccuguuucugucaucuaugauaaagaaacuaaaacccacgcuacucuauuugguaguguugcaugugaacacauuucuucuaccaugucucaauacucccguucuacgcgaucaaugcuuaaacggcgagauucuacauauggcccccuucagacaccuguugguuguguccuaggacuuguuaauuccucuuuguucguagaggacugcaaguugccucuuggucaaucucucugugcucuuccugacacaccuaguacucucacaccucgcagugugcgcucuguuccaggugaaaugcgcuuggcauccauugcuuuuaaucauccuauucagguugaucaacuuaauaguaguuauuuuaaauuaaguauacccacuaauuuuuccuuuggugugacucaggaguacauucagacaaccauucagaaaguuacuguugauuguaaacaguacguuugcaaugguuuccagaagugugagcaauuacugcgcgaguauggccaguuuuguuccaaaauaaaccaggcucuccauggugccaauuuacgccaggaugauucuguacguaauuuguuugcgagcgugaaaagcucucaaucaucuccuaucauaccagguuuuggaggugacuuuaauuugacacuucuagaaccuguuucuauaucuacuggcagucguagugcacguagugcuauugaggauuugcuauuugacaaagucacuauagcugauccugguuauaugcaagguuacgaugauugcaugcagcaagguccagcaucagcucgugaucuuauuugugcucaauauguggcugguuacaaaguauuaccuccucuuauggauguuaauauggaagccgcguauacuucaucuuugcuuggcagcauagcagguguuggcuggacugcuggcuuauccuccuuugcugcuauuccauuugcacagaguaucuuuuauagguuaaacgguguuggcauuacucaacagguucuuucagagaaccaaaagcuuauugccaauaaguuuaaucaggcucugggagcuaugcaaacaggcuucacuacaacuaaugaagcuuuucagaagguucaggaugcugugaacaacaaugcacaggcucuauccaaauuagcuagcgagcuaucuaauacuuuuggugcuauuuccgccucuauuggagacaucauacaacgucuugauguucucgaacaggacgcccaaauagacagacuuauuaauggccguuugacaacacuaaaugcuuuuguugcacagcagcuuguucguuccgaaucagcugcucuuuccgcucaauuggcuaaagauaaagucaaugagugugucaaggcacaauccaagcguucuggauuuugcggucaaggcacacauauaguguccuuuguuguaaaugccccuaauggccuuuacuucaugcauguugguuauuacccuagcaaccacauugagguuguuucugcuuauggucuuugcgaugcagcuaacccuacuaauuguauagccccuguuaauggcuacuuuauuaaaacuaauaacacuaggauuguugaugaguggucauauacuggcucguccuucuaugcaccugagcccauuaccucccuuaauacuaaguauguugcaccacaggugacauaccaaaacauuucuacuaaccucccuccuccucuucucggcaauuccaccgggauugacuuccaagaugaguuggaugaguuuuucaaaaauguuagcaccaguauaccuaauuuugguucccuaacacagauuaauacuacauuacucgaucuuaccuacgagauguugucucuucaacaaguuguuaaagcccuuaaugagucuuacauagaccuuaaagagcuuggcaauuauacuuauuacaacaaauggccgugguacauuuggcuugguuucauugcugggcuuguugccuuagcucuaugcgucuucuucauacugugcugcacugguuguggcacaaacuguaugggaaaacuuaaguguaaucguuguugugauagauacgaggaauacgaccucgagccgcauaagguucauguucacuaauuaacgaacuauuaaugagaguucaaagaccacccacucucuuguuaguguuuucacucucucuuuuggucacugcauccucaaaaccucucuauguaccugagcauugucagaauuauucugguugcaugcuuagggcuuguauuaaaacugcccaagcugauacagcuggucuuuauacaaauuuucgaauugacgucccaucugcagaaucaacugguacucaaucaguuucugucgaucuugagucaacuucaacucaugaugguccuaccgaacauguuacuagugugaaucuuuuugacguugguuacucaguuaauuaacgaacucuauggauuacgugucucugcuuaaucaaauuuggcagaaguaccuuaacucaccguauacuacuuguuuguacaucccuaaacccacagcuaaguauacaccuuuaguuggcacuucauugcacccugugcuguggaacugucagcuauccuuugcugguuauacugaaucugcuguuaauucuacaaaagcuuuggccaaacaggacgcagcucagcgaaucgcuugguugcuacauaaggauggaggaaucccugauggauguucccucuaccuccggcacucaaguuuauucgcgcaaagcgaggaagaggagccauucuccaacuaagaaacugcgcuacguuaagcguagauuuucucuucugcgccaugaagaccuuaguguuauuguccaaccaacacacuaugucaggguuacauuuucagaccccaacaugugguaucuacguucgggucaucauuuacacucaguucacaauuggcuuaaaccuuauggcggccaaccuguuucugaguaccauauuacucuagcuuugcuaaaucucacugaugaagauuuagcuagagauuuuucacccauugcgcucuuuuugcgcaaugucagauuugagcuacaugaguucgccuugcugcgcaaaacucuuguucuuaaugcaucagagaucuacugugcuaacauacauagauuuaagccuguguauagaguuaacacggcaaucccuacuauuaaggauuggcuucucguucagggauuuucccuuuaccauaguggccucccuuuacauaugucaaucucuaaauugcaugcacuggaugauguuacucgcaauuacaucauuacaaugccaugcuuuagaacuuacccucaacaaauguuuguuacuccuuuggccguagauguugucuccauacggucuuccaaucaggguaauaaacaaauuguucauucuuaucccauuuuacaucauccaggauuuuaacgaacuauggcuuucucggcgucuuuauuuaaacccguccagcuagucccaguuucuccugcauuucaucgcauugagucuacugacucuauuguuuucacauacauuccugcuagcggcuauguagcugcuuuagcugucaaugugugucucauuccccuauuauuacugcuacgucaagauacuugucgucgcagcauuaucagaacuaugguucucuauuuccuuguucuguauaacuuuuuauuagccauuguacuagucaaugguguacauuauccaacuggaaguugccugauagccuucuuaguuauccucauaauacuuugguuuguagauagaauucguuucugucucaugcugaauuccuacauuccacuguuugacaugcguucccacuuuauucguguuaguacaguuucuucucaugguauggucccuguaauacacaccaaaccauuauuuauuagaaacuucgaucagcguugcagcuguucucguuguuuuuauuugcacucuuccacuuauauagagugcacuuauauuagccguuuuaguaagauuagccuaguuucuguaacugacuucuccuuaaacggcaauguuuccacuguuuucgugccugcaacgcgcgauucaguuccucuucacauaaucgccccgagcucgcuuaucguuuaagcagcucugcgcuacuaugggucccguguagaggcuaauccauuagucucucuuuggacauauggaaaacgaacuauguuacccuuuguccaagaacgaauaggguuguucauaguaaacuuuuucauuuuuaccguaguaugugcuauaacacucuugguguguauggcuuuccuuacggcuacuagauuaugugugcaauguaugacaggcuucaauacccuguuaguucagcccgcauuauacuuguauaauacuggacguucagucuauguaaaauuccaggauaguaaacccccucuaccaccugacgaguggguuuaacgaacuccuucauaaugucuaauaugacgcaacucacugaggcgcagauuauugccauuauuaaagacuggaacuuugcauggucccugaucuuucucuuaauuacuaucguacuacaguauggauacccaucccguaguaugacugucuaugucuuuaaaauguuuguuuuauggcuccuauggccaucuuccauggcgcuaucaauauuuagcgccguuuauccaauugaucuagcuucccagauaaucucuggcauuguagcagcuguuucagcuaugauguggauuuccuacuuugugcagaguauccggcuguuuaugagaacuggaucaugguggucauucaauccugagacuaauugccuuuugaacguuccauuuggugguacaacugucguacguccacucguagaggacucuaccaguguaacugcuguuguaaccaauggccaccucaaaauggcuggcaugcauuucggugcuugugacuacgacagacuuccuaaugaagucaccguggccaaacccaaugugcugauugcuuuaaaaauggugaagcggcaaagcuacggaacuaauuccggcguugccauuuaccauagauauaaggcagguaauuacaggaguccgccuauuacggcggauauugaacuugcauugcuucgagcuuaggcucuuuaguaagaguaucuuaauugauuuuaacgaaucucaauuucauuguuauggcauccccugcugcaccucgugcuguuuccuuugccgauaacaaugauauaacaaauacaaaccuaucucgagguagaggacguaauccaaaaccacgagcugcaccaaauaacacugucucuugguacacugggcuuacccaacacgggaaagucccucuuaccuuuccaccugggcaggguguaccucuuaaugccaauucuaccccugcgcaaaaugcuggguauuggcggagacaggacagaaaaauuaauaccgggaauggaauuaagcaacuggcucccaggugguacuucuacuacacuggaacuggacccgaagcagcacucccauuccgggcuguuaaggauggcaucguuuggguccaugaagauggcgccacugaugcuccuucaacuuuugggacgcggaacccuaacaaugauucagcuauuguuacacaauucgcgcccgguacuaagcuuccuaaaaacuuccacauugaggggacuggaggcaauagucaaucaucuucaagagccucuagcuuaagcagaaacucuuccagaucuaguucacaagguucaagaucaggaaacucuacccgcggcacuucuccagguccaucuggaaucggagcaguaggaggugaucuacuuuaccuugaucuucugaacagacuacaagcccuugagucuggcaaaguaaagcaaucgcagccaaaaguaaucacuaagaaagaugcugcugcugcuaaaaauaagaugcgccacaagcgcacuuccaccaaaaguuucaacauggugcaagcuuuuggucuucgcggaccaggagaccuccagggaaacuuuggugaucuucaauugaauaaacucggcacugaggacccacguuggccccaaauugcugagcuugcuccuacagccagugcuuuuauggguaugucgcaauuuaaacuuacccaucagaacaaugaugaucauggcaacccuguguacuuccuucgguacaguggagccauuaaacuugacccaaagaaucccaacuacaauaagugguuggagcuucuugagcaaaauauugaugccuacaaaaccuucccuaagaaggaaaagaaacaaaaggcaccaaaagaagaaucaacagaccaaaugucugaaccuccaaaggagcagcgugugcaagguagcaucacucagcgcacucgcacccguccaaguguucagccugguccaaugauugauguuaacacugauuagugucacucaaaguaacaagaucgcggcaaucguuuguguuuggcaaccccaucucaccaucgcuuguccacucuugcacagaauggaaucauguuguaauuacagugcaauaagguaauuauaacccauuuaauugauagcuaugcuuuauuaaaguguguagcuguagagagaauguuaaagacugucaccucugcuugauugcaagugaacagugccccccgggaagagcucuacagugugaaauguaaauaaaaaauagcuauuauucaauuagauuaggcuaauuagaugauuugcaaaaaaaaaaaa

SEQ ID NO: 28 - DNA, 28569 bp, Artificial Sequence
  T7-mcv-replicon1
taatacgactcactatagatttaagtgaatagcttggctatctcacttcccctcgttctcttgcagaactttgattttaacgaacttaaataaaagccctgttgtttagcgtatcgttgcacttgtctggtgggattgtggcattaatttgcctgctcatctaggcagtggacatatgctcaacactgggtataattctaattgaatactatttttcagttagagcgtcgtgtctcttgtacgtctcggtcacaatacacggtttcgtccggtgcgtggcaattcggggcacatcatgtctttcgtggctggtgtgaccgcgcaaggtgcgcgcggtacgtatcgagcagcgctcaactctgaaaaacatcaagaccatgtgtctctaactgtgccactctgtggttcaggaaacctggttgaaaaactttcaccatggttcatggatggcgaaaatgcctatgaagtggtgaaggccatgttacttaaaaaggagccacttctctatgtgcccatccggctggctggacacactagacacctcccaggtcctcgtgtgtacctggttgagaggctcattgcttgtgaaaatccattcatggttaaccaattggcttatagctctagtgcaaatggcagcctggttggcacaactttgcagggcaagcctattggtatgttcttcccttatgacatcgaacttgtcacaggaaagcaaaatattctcctgcgcaagtatggccgtggtggttatcactacaccccattccactatgagcgagacaacacctcttgccctgagtggatggacgattttgaggcggatcctaaaggcaaatatgcccagaatctgcttaagaagttgattggcggtgatgtcactccagttgaccaatacatgtgtggcgttgatggaaaacccattagtgcctacgcatttttaatggccaaggatggaataaccaaactggctgatgttgaagcggacgtcgcagcacgtgctgatgacgaaggcttcatcacattaaagaacaatctatatagattggtttggcatgttgagcgtaaagacgttccatatcctaagcaatctatttttactattaatagtgtggtccaaaaggatggtgttgaaaacactcctcctcactattttactcttggatgcaaaattttaacgctcaccccacgcaacaagtggagtggcgtttctgacttgtccctcaaacaaaaactcctttacaccttctatggtaaggagtcacttgagaacccaacctacatttaccactccgcattcattgagtgtggaagttgtggtaatgattcctggcttacagggaatgctatccaagggtttgcctgtggatgtggggcatcatatacagctaatgatgtcgaagtccaatcatctggcatgattaagccaaatgctcttctttgtgctacttgcccctttgctaagggtgatagctgttcttctaattgcaaacattcagttgctcagttggttagttacctttctgaacgctgtaatgttattgctgattctaagtccttcacacttatctttggtggcgtagcttacgcctactttggatgtgaggaaggtactatgtactttgtgcctagagctaagtctgttgtctcaaggattggagactccatctttacaggctgtactggctcttggaacaaggtcactcaaattgctaacatgttcttggaacagactcagcattcccttaactttgtgggagagttcgttgtcaacgatgttgtcctcgcaattctctctggaaccacaactaatgttgacaaaatacgccagcttctcaaaggtgtcacccttgacaagttgcgtgattatttagctgactatgacgtagcagtcactgccggcccattcatggataatgctattaatgttggtggtacaggattacagtatgccgccattactgcaccttatgtagttctcactggcttaggtgagtcctttaagaaagttgcaaccataccgtataaggtttgcaactctgttaaggatactctggcttattatgctcacagcgtgttgtacagagtttttccttatgacatggattctggtgtgtcatcctttagtgaactactttttgattgcgttgatctttcagtagcttctacctattttttagtccgcatcttgcaagataagactggcgactttatgtctacaattattacttcctgccaaactgctgttagtaagcttctagatacatgttttgaagctacagaagcaacatttaacttcttgttagatttggcaggattgttcagaatctttctccgcaatgcctatgtgtacacttcacaagggtttgtggtggtcaatggcaaagtttctacacttgtcaaacaagtgttagacttgcttaataagggtatgcaacttttgcatacaaaggtctcctgggctggttctaaaatcattgctgttatctacagcggcagggagtctctaatattcccatcgggaacctattactgtgtcaccactaaggctaagtccgttcaacaagatcttgacgttattttgcctggtgagttttccaagaagcagttaggactgctccaacctactgacaattctacaactgttagtgttactgtatccagtaacatggttgaaactgttgtgggtcaacttgagcaaactaatatgcatagtcctgatgttatagtaggtgactatgtcattattagtgaaaaattgtttgtgcgtagtaaggaagaagacggatttgccttctaccctgcttgcactaatggtcatgctgtaccgactctctttagacttaagggaggtgcacctgtaaaaaaagtagcctttggcggtgatcaagtacatgaggttgctgctgtaagaagtgttactgtcgagtacaacattcatgctgtattagacacactacttgcttcttctagtcttagaacctttgttgtagataagtctttgtcaattgaggagtttgctgacgtagtaaaggaacaagtctcagacttgcttgttaaattactgcgtggaatgccgattccagattttgatttagacgattttattgacgcaccatgctattgctttaacgctgagggtgatgcatcctggtcttctactatgatcttctctcttcaccccgtcgagtgtgacgaggagtgttctgaagtagaggcttcagatttagaagaaggtgaatcagagtgcatttctgagacttcaactgaacaagttgacgtttctcatgagacttctgacgacgagtgggctgctgcagttgatgaagcgttccctctcgatgaagcagaagatgttactgaatctgtgcaagaagaagcacaaccagtagaagtacctgttgaagatattgcgcaggttgtcatagctgacaccttacaggaaactcctgttgtgcctgatactgttgaagtcccaccgcaagtggtgaaacttccgtctgcacctcagactatccagcccgaggtaaaagaagttgcacctgtctatgaggctgataccgaacagacacagaatgttactgttaaacctaagaggttacgcaaaaagcgtaatgttgaccctttgtccaattttgaacataaggttattacagagtgcgttaccatagttttaggtgacgcaattcaagtagccaagtgctatggggagtctgtgttagttaatgctgctaacacacatcttaagcatggcggtggtatcgctggtgctattaatgcggcttcaaaaggggctgtccaaaaagagtcagatgagtatattctggctaaagggccgttacaagtaggagattcagttctcttgcaaggccattctctagctaagaatatcctgcatgtcgtaggcccagatgcccgcgctaaacaggatgtttctctccttagtaagtgctataaggctatgaatgcatatcctcttgtagtcactcctcttgtttcagcaggcatatttggtgtaaaaccagctgtgtcttttgattatcttattagggaggctaagactagagttttagtcgtcgttaattcccaagatgtctataagagtcttaccatagttgacattccacagagtttgactttttcatatgatgggttacgtggcgcaatacgtaaagctaaagattatggttttactgtttttgtgtgcacagacaactctgctaacactaaagttcttaggaacaagggtgttgattatactaagaagtttcttacagttgacggtgtgcaatattattgctacacgtctaaggacactttagatgatatcttacaacaggctaataagtctgttggtattatatctatgcctttgggatatgtgtctcatggtttagacttaatgcaagcagggagtgtcgtgcgtagagttaacgtgccctacgtgtgtctcctagctaataaagagcaagaagctattttgatgtctgaagacgttaagttaaacccttcagaagattttataaagcacgtccgcactaatggtggttacaattcttggcatttagtcgagggtgaactattggtgcaagacttacgcttaaataagctcctgcattggtctgatcaaaccatatgctacaaggatagtgtgttttatgttgtaaagaatagtacagcttttccatttgaaacactttcagcatgtcgtgcgtatttggattcacgcacgacacagcagttaacaatcgaagtcttagtgactgtcgatggtgtaaattttagaacagtcgttctaaataataagaacacttatagatcacagcttggatgcgttttctttaatggtgctgatatttctgacaccattcctgatgagaaacagaatggtcacagtttatatctagcagacaatttgactgctgatgaaacaaaggcgcttaaagagttatatggccccgttgatcctactttcttacacagattctattcacttaaggctgcagtccatgggtggaagatggttgtgtgtgataaggtacgttctctcaaattgagtgataataattgttatcttaatgcagttattatgacacttgatttattgaaggacattaaatttgttatacctgctctacagcatgcatttatgaaacataagggcggtgattcaactgacttcatagccctcattatggcttatggcaattgcacatttggtgctccagatgatgcctctcggttacttcataccgtgcttgcaaaggctgagttatgctgttctgcacgcatggtttggagagagtggtgcaatgtctgtggcataaaagatgttgttctacaaggcttaaaagcttgttgttacgtgggtgtgcaaactgttgaagatctgcgtgctcgcatgacatatgtatgccagtgtggtggtgaacgtcatcggcaattagtcgaacacaccaccccctggttgctgctctcaggcacaccaaatgaaaaattggtgacaacctccacggcgcctgattttgtagcatttaatgtctttcagggcattgaaacggctgttggccattatgttcatgctcgcctgaagggtggtcttattttaaagtttgactctggcaccgttagcaagacttcagactggaagtgcaaggtgacagatgtacttttccccggccaaaaatacagtagcgattgtaatgtcgtacggtattctttggacggtaatttcagaacagaggttgatcccgacctatctgctttctatgttaaggatggtaaatactttacaagtgaaccacccgtaacatattcaccagctacaattttagctggtagtgtctacactaatagctgccttgtatcgtctgatggacaacctggcggtgatgctattagtttgagttttaataaccttttagggtttgattctagtaaaccagtcactaagaaatacacttactccttcttgcctaaagaagacggcgatgtgttgttggctgagtttgacacttatgaccctatttataagaatggtgccatgtataaaggcaaaccaattctttgggtcaataaagcatcttatgatactaatcttaataagttcaatagagctagtttgcgtcaaatttttgacgtagcccccattgaactcgaaaataaattcacacctttgagtgtggagtctacaccagttgaacctccaactgtagatgtggtagcacttcaacaggaaatgacaattgtcaaatgtaagggtttaaataaacctttcgtgaaggacaatgtcagtttcgttgctgatgattcaggtactcccgttgttgagtatctgtctaaagaagacctacatacattgtatgtagaccctaagtatcaagtcattgtcttaaaagacaatgtactttcttctatgcttagattgcacaccgttgagtcaggtgatattaacgttgttgcagcttccggatctttgacacgtaaagtgaagttactatttagggcttcattttatttcaaagaatttgctacccgcactttcactgctaccactgctgtaggtagttgtataaagagtgtagtgcggcatctaggtgttactaaaggcatattgacaggctgttttagttttgccaagatgttatttatgcttccactagcttactttagtgattcaaaactcggcaccacagaggttaaagtgagtgctttgaaaacagccggcgttgtgacaggtaatgttgtaaaacagtgttgcactgctgctgttgatttaagtatggataagttgcgccgtgtggattggaaatcaaccctacggttgttacttatgttatgcacaactatggtattgttgtcttctgtgtatcacttgtatgtcttcaatcaggtcttatcaagtgatgttatgtttgaagatgcccaaggtttgaaaaagttctacaaagaagttagagcttacctaggaatctcttctgcttgtgacggtcttgcttcagcttatagggcgaattcctttgatgtacctacattctgcgcaaaccgttctgcaatgtgtaattggtgcttgattagccaagattccataactcactacccagctcttaagatggttcaaacacatcttagccactatgttcttaacatagattggttgtggtttgcatttgagactggtttggcatacatgctctatacctcggccttcaactggttgttgttggcaggtacattgcattatttctttgcacagacttccatatttgtagactggcggtcatacaattatgctgtgtctagtgccttctggttattcacccacattccaatggcgggtttggtacgaatgtataatttgttagcatgcctttggcttttacgcaagttttatcagcatgtaatcaatggttgcaaagatacggcatgcttgctctgctataagaggaaccgacttactagagttgaagcttctaccgttgtctgtggtggaaaacgtacgttttatatcacagcaaatggcggtatttcattctgtcgtaggcataattggaattgtgtggattgtgacactgcaggtgtggggaataccttcatctgtgaagaagtcgcaaatgacctcactaccgccctacgcaggcctattaacgctacggatagatcacattattatgtggattccgttacagttaaagagactgttgttcagtttaattatcgtagagacggtcaaccattctacgagcggtttcccctctgcgcttttacaaatctagataagttgaagttcaaagaggtctgtaaaactactactggtatacctgaatacaactttatcatctacgactcatcagatcgtggccaggaaagtttagctaggtctgcatgtgtttattattctcaagtcttgtgtaaatcaattcttttggttgactcaagtttggttacttctgttggtgattctagtgaaatcgccactaaaatgtttgattcctttgttaatagtttcgtctcgctgtataatgtcacacgcgataagttggaaaaacttatctctactgctcgtgatggcgtaaggcgaggcgataacttccatagtgtcttaacaacattcattgacgcagcacgaggccccgcaggtgtggagtctgatgttgagaccaatgaaattgttgactctgtgcagtatgctcataaacatgacatacaaattactaatgagagctacaataattatgtaccctcatatgttaaacctgatagtgtgtctaccagcgatttaggtagtctcattgattgtaatgcggcttcagttaaccaaattgtcttgcgtaattctaatggtgcttgcatttggaacgctgctgcatatatgaaactctcggatgcacttaaacgacagattcgcattgcatgccgtaagtgtaatttagctttccggttaaccacctcaaagctacgcgctaatgataatatcttatcagttagattcactgctaacaaaattgttggtggtgctcctacatggtttaatgcgttgcgtgactttacgttaaagggttatgttcttgctaccattattgtgtttctgtgtgctgtactgatgtatttgtgtttacctacattttctatggcacctgttgaattttatgaagaccgcatcttggactttaaagttcttgataatggtatcattagggatgtaaatcctgatgataagtgctttgctaataagcaccggtccttcacacaatggtatcatgagcatgttggtggtgtctatgacaactctatcacatgcccattgacagttgcagtaattgctggagttgctggtgctcgcattccagacgtacctactacattggcttgggtgaacaatcagataattttctttgtttctcgagtctttgctaatacaggcagtgtttgctacactcctatagatgagataccctataagagtttctctgatagtggttgcattcttccatctgagtgcactatgtttagggatgcagagggccgtatgacaccatactgccatgatcctactgttttgcctggggcttttgcgtacagtcagatgaggcctcatgttcgttacgacttgtatgatggtaacatgtttattaaatttcctgaagtagtatttgaaagtacacttaggattactagaactctgtcaactcagtactgccggttcggtagttgtgagtatgcacaagagggtgtttgtattaccacaaatggctcgtgggccatttttaatgaccaccatcttaatagacctggtgtctattgtggctctgattttattgacattgtcaggcggttagcagtatcactgttccagcctattacttatttccaattgactacctcattggtcttgggtataggtttgtgtgcgttcctgactttgctcttctattatattaataaagtaaaacgtgcttttgcagattacacccagtgtgctgtaattgctgttgttgctgctgttcttaatagcttgtgcatctgctttgttacctctataccattgtgtatagtaccttacactgcattgtactattatgctacattctattttactaatgagcctgcatttattatgcatgtttcttggtacattatgttcgggcctatcgttcccatatggatgacctgcgtctatacagttgcaatgtgctttagacacttcttctgggttttagcttattttagtaagaaacatgtagaagtttttactgatggtaagcttaattgtagtttccaggacgctgcctctaatatctttgttattaacaaggacacttatgcagctcttagaaactctttaactaatgatgcctattcacgatttttggggttgtttaacaagtataagtacttctctggtgctatggaaacagccgcttatcgtgaagctgcagcatgtcatcttgctaaagccttacaaacatacagcgagactggtagtgatcttctttaccaaccacccaactgtagcataacctctggcgtgttgcaaagcggtttggtgaaaatgtcacatcccagtggagatgttgaggcttgtatggttcaggttacctgcggtagcatgactcttaatggtctttggcttgacaacacagtctggtgcccacgacacgtaatgtgcccggctgaccagttgtctgatcctaattatgatgccttgttgatttctatgactaatcatagtttcagtgtgcaaaaacacattggcgctccagcaaacttgcgtgttgttggtcatgccatgcaaggcactcttttgaagttgactgtcgatgttgctaaccctagcactccagcctacacttttacaacagtgaaacctggcgcagcatttagtgtgttagcatgctataatggtcgtccgactggtacattcactgttgtaatgcgccctaactacacaattaagggttcctttctgtgtggttcttgtggtagtgttggttacaccaaggagggtagtgtgatcaatttctgttacatgcatcaaatggaacttgctaatggtacacataccggttcagcatttgatggtactatgtatggtgcctttatggataaacaagtgcaccaagttcagttaacagacaaatactgcagtgttaatgtagtagcttggctttacgcagcaatacttaatggttgcgcttggtttgtaaaacctaatcgcactagtgttgtttcttttaatgaatgggctcttgccaaccaattcactgaatttgttggcactcaatccgttgacatgttagctgtcaaaacaggcgttgctattgaacagctgctttatgcgatccaacaactgtatactgggttccagggaaagcaaatccttggcagtaccatgttggaagatgaattcacacctgaggatgttaatatgcagattatgggtgtggttatgcagagtggtgtgagaaaagttacatatggtactgcgcattggttgtttgcgacccttgtctcaacctatgtgataatcttacaagccactaaatttactttgtggaactacttgtttgagactattcccacacagttgttcccactcttatttgtgactatggccttcgttatgttgttggttaaacacaaacacacctttttgacacttttcttgttgcctgtggctatttgtttgacttatgcaaacatagtctacgagcccactactcccatttcgtcagcgctgattgcagttgcaaattggcttgcccccactaatgcttatatgcgcactacacatactgatattggtgtctacattagtatgtcacttgtattagtcattgtagtgaagagattgtacaacccatcactttctaactttgcgttagcattgtgcagtggtgtaatgtggttgtacacttatagcattggagaagcctcaagccccattgcctatctggtttttgtcactacactcactagtgattatacgattacagtctttgttactgtcaaccttgcaaaagtttgcacttatgccatctttgcttactcaccacagcttacacttgtgtttccggaagtgaagatgatacttttattatacacatgtttaggtttcatgtgtacttgctattttggtgtcttctctcttttgaaccttaagcttagagcacctatgggtgtctatgactttaaggtctcaacacaagagttcagattcatgactgctaacaatctaactgcacctagaaattcttgggaggctatggctctgaactttaagttaataggtattggcggtacaccttgtataaaggttgctgctatgcagtctaaacttacagatcttaaatgcacatctgtggttctcctctctgtgctccaacagttacacttagaggctaatagtagggcctgggctttctgtgttaaatgccataatgatatattggcagcaacagaccccagtgaggctttcgagaaattcgtaagtctctttgctactttaatgactttttctggtaatgtagatcttgatgcgttagctagtgatatttttgacactcctagcgtacttcaagctactctttctgagttttcacacttagctacctttgctgagttggaagctgcgcagaaagcctatcaggaagctatggactctggtgacacctcaccacaagttcttaaggctttgcagaaggctgttaatatagctaaaaacgcctatgagaaggataaggcagtggcccgtaagttagaacgtatggctgatcaggctatgacttctatgtataagcaagcacgtgctgaagacaagaaagcaaaaattgtcagtgctatgcaaactatgttgtttggtatgattaagaagctcgacaacgatgttcttaatggtatcatttctaacgctaggaatggttgtatacctcttagtgtcatcccactgtgtgcttcaaataaacttcgcgttgtaattcctgacttcaccgtctggaatcaggtagtcacatatccctcgcttaactacgctggggctttgtgggacattacagttataaacaatgtggacaatgaaattgttaagtcttcagatgttgtagacagcaatgaaaatttaacatggccacttgttttagaatgcactagggcatccacttctgccgttaagttgcaaaataatgagatcaaaccttcaggtctaaaaaccatggttgtgtctgcgggtcaagagcaaactaactgtaatactagttccttagcttattacgaacctgtgcagggtcgtaaaatgctgatggctcttctttctgataatgcctatctcaaatgggcgcgtgttgaaggtaaggacggatttgtcagtgtagagctacaacctccttgcaaattcttgattgcgggaccaaaaggacctgaaatccgatatctctattttgttaaaaatcttaacaaccttcatcgcgggcaagtgttagggcacattgctgcgactgttagattgcaagctggttctaacaccgagtttgcctctaattcctcggtgttgtcacttgttaacttcaccgttgatcctcaaaaagcttatctcgatttcgtcaatgcgggaggtgccccattgacaaattgtgttaagatgcttactcctaaaactggtacaggtatagctatatctgttaaaccagagagtacagctgatcaagagacttatggtggagcttcagtgtgtctctattgccgtgcgcatatagaacatcctgatgtctctggtgtttgtaaatataagggtaagtttgtccaaatccctgctcagtgtgtccgtgaccctgtgggattttgtttgtcaaataccccctgtaatgtctgtcaatattggattggatatgggtgcaattgtgactcgcttaggcaagcagcactgccccaatctaaagattccaattttttaaacgagtccggggttctattgtaaatgcccgaatagaaccctgttcaagtggtttgtccactgatgtcgtctttagggcatttgacatctgcaactataaggctaaggttgctggtattggaaaatactacaagactaatacttgtaggtttgtagaattagatgaccaagggcatcatttagactcctattttgtcgttaagaggcatactatggagaattatgaactagagaagcactgttacgacttgttacgtgactgtgatgctgtagctccccatgatttcttcatctttgatgtagacaaagttaaaacacctcatattgtacgtcagcgtttaactgagtacactatgatggatcttgtatatgccctgaggcactttgatcaaaatagcgaagtgcttaaggctatcttagtgaagtatggttgctgtgatgttacctactttgaaaataaactctggtttgattttgttgaaaatcccagtgttattggtgtttatcataaacttggagaacgtgtacgccaagctatcttaaacactgttaaattttgtgaccacatggtcaaggctggtttagtcggtgtgctcacactagacaaccaggaccttaatggcaagtggtatgattttggtgacttcgtaatcactcaacctggttcaggagtagctatagttgatagctactattcttatttgatgcctgtgctctcaatgaccgattgtctggccgctgagacacatagggattgtgattttaataaaccactcattgagtggccacttactgagtatgattttactgattataaggtacaactctttgagaagtactttaaatattgggatcagacgtatcacgcaaattgcgttaattgtactgatgaccgttgtgtgttacattgtgctaatttcaatgtattgtttgctatgaccatgcctaagacttgtttcggacccatagtccgaaagatctttgttgatggcgtgccatttgtagtatcttgtggttatcactacaaagaattaggtttagtcatgaatatggatgttagtctccatagacataggctctctcttaaggagttgatgatgtatgccgctgatccagccatgcacattgcctcctctaacgcttttcttgatttgaggacatcatgttttagtgtcgctgcacttacaactggtttgacttttcaaactgtgcggcctggcaattttaaccaagacttctatgatttcgtggtatctaaaggtttctttaaggagggctcttcagtgacgctcaaacattttttctttgctcaagatggtaatgctgctattacagattataattactattcttataatctgcctactatgtgtgacatcaaacaaatgttgttctgcatggaagttgtaaacaagtacttcgaaatctatgacggtggttgtcttaatgcttctgaagtggttgttaataatttagacaagagtgctggccatccttttaataagtttggcaaagctcgtgtctattatgagagcatgtcttaccaggagcaagatgaactttttgccatgacaaagcgtaacgtcattcctaccatgactcaaatgaatctaaaatatgctattagtgctaagaatagagctcgcactgttgcaggcgtgtccatacttagcacaatgactaatcgccagtaccatcagaaaatgcttaagtccatggctgcaactcgtggagcgacttgcgtcattggtactacaaagttctacggtggctgggatttcatgcttaaaacattgtacaaagatgttgataatccgcatcttatgggttgggattaccctaagtgtgatagagctatgcctaatatgtgtagaatcttcgcttcactcatattagctcgtaaacatggcacttgttgtactacaagggacagattttatcgcttggcaaatgagtgtgctcaggtgctaagcgaatatgttctatgtggtggtggttactacgtcaaacctggaggtaccagtagcggagatgccaccactgcatatgccaatagtgtctttaacattttgcaggcgacaactgctaatgtcagtgcacttatgggtgctaatggcaacaagattgttgacaaagaagttaaagacatgcagtttgatttgtatgtcaatgtttacaggagcactagcccagaccccaaatttgttgataaatactatgcttttcttaataagcacttttctatgatgatactgtctgatgacggtgtcgtttgctataatagtgattatgcagctaagggttacattgctggaatacagaattttaaggaaacgctgtattatcagaacaatgtctttatgtctgaagctaaatgctgggtggaaaccgatctgaagaaagggccacatgaattctgttcacagcatacgctttatattaaggatggcgacgatggttacttccttccttatccagacccttcaagaattttgtctgccggttgctttgtagatgatatcgttaagactgacggtacactcatggtagagcggtttgtgtctttggctatagatgcttaccctctcacaaagcatgaagatatagaataccagaatgtattctgggtctacttacagtatatagaaaaactgtataaagaccttacaggacacatgcttgacagttattctgtcatgctatgtggtgataattctgctaagttttgggaagaggcattctatagagatctctatagttcgcctaccactttgcaggctgtcggttcatgcgttgtatgccattcacagacttccctacgctgtgggacatgcatccgtagaccatttctctgctgtaaatgctgctatgatcatgttatagcaactccacataagatggttttgtctgtttctccttacgtttgtaatgcccctggttgtggcgtttcagacgttactaagctatatttaggtggtatgagctacttttgtgtagatcatagacctgtgtgtagttttccactttgcgctaatggtcttgtattcggcttatacaagaatatgtgcacaggtagtccttctatagttgaatttaataggttggctacctgtgactggactgaaagtggtgattacacccttgccaatactacaacagaaccactcaaactttttgctgctgagactttacgtgccactgaagaggcgtctaagcagtcttatgctattgccaccatcaaagaaattgttggtgagcgccaactattacttgtgtgggaggctggcaagtccaaaccaccactcaatcgtaattatgtttttactggttatcatataaccaaaaatagtaaagtgcagctcggtgagtacattttcgagcgcattgattatagtgatgctgtatcctacaagtctagtacaacgtataaactgactgtaggtgacatcttcgtacttacctctcactctgtggctaccttgacggcgcccacaattgtgaatcaagagaggtatgttaaaattactgggttgtacccaaccattacggtacctgaagagttcgcaagtcatgttgccaacttccaaaaatcaggttatagtaaatatgtcactgttcagggaccacctggcactggcaaaagtcattttgctatagggttagcgatttactaccctacagcacgtgttgtttatacagcatgttcacacgcagctgttgatgctttgtgtgaaaaagcttttaaatatttgaacattgctaaatgttcccgtatcattcctgcaaaggcacgtgttgagtgctatgacaggtttaaagttaatgagacaaattctcaatatttgtttagtactattaatgctctaccagaaacttctgccgatattctggtggttgatgaggttagtatgtgcactaattatgatctttcaattattaatgcacgtattaaagctaagcacattgtctatgtaggagatccagcacagttgccagctcctaggactttgttgactagaggcacattggaaccagaaaatttcaatagtgtcactagattgatgtgtaacttaggtcctgacatatttttaagtatgtgctacaggtgtcctaaggaaatagtaagcactgtgagcgctcttgtctacaataataaattgttagccaagaaggagctttcaggccagtgctttaaaatactctataagggcaatgtgacgcatgatgctagctctgccattaatagaccacaactcacatttgtgaagaattttattactgccaatccggcatggagtaaggcagtctttatttcgccttacaattcacagaatgctgtgtctcgttcaatgctgggtcttaccactcagactgttgattcctcacagggttcagaataccagtacgttatcttctgtcaaacagcagatacggcacatgctaacaacattaacagatttaatgttgcaatcactcgtgcccaaaaaggtattctttgtgttatgacatctcaggcactctttgagtccttagagtttactgaattgtcttttactaattacaagctccagtctcagattgtaactggcctttttaaagattgctctagagaaacttctggcctctcacctgcttatgcaccaacatatgttagtgttgatgacaagtataagacgagtgatgagctttgcgtgaatcttaatttacccgcaaatgtcccatactctcgtgttatttccaggatgggctttaaactcgatgcaacagttcctggatatcctaagcttttcattactcgtgaagaggctgtaaggcaagttcgaagctggataggcttcgatgttgagggtgctcatgcttcccgtaatgcatgtggcaccaatgtgcctctacaattaggattttcaactggtgtgaactttgttgttcagccagttggtgttgtagacactgagtggggtaacatgttaacgggcattgctgcacgtcctccaccaggtgaacagtttaagcacctcgtgcctcttatgcataagggggctgcgtggcctattgttagacgacgtatagtgcaaatgttgtcagacactttagacaaattgtctgattactgtacgtttgtttgttgggctcatggctttgaattaacgtctgcatcatacttttgcaagataggtaaggaacagaagtgttgcatgtgcaatagacgcgctgcagcgtactcttcacctctgcaatcttatgcctgctggactcattcctgcggttatgattatgtctacaaccctttctttgtcgatgttcaacagtggggttatgtaggcaatcttgctactaatcacgatcgttattgctctgtccatcaaggagctcatgtggcttctaatgatgcaataatgactcgttgtttagctattcattcttgttttatagaacgtgtggattgggatatagagtatccttatatctcacatgaaaagaaattgaattcctgttgtagaatcgttgagcgcaacgtcgtacgtgctgctcttcttgccggttcatttgacaaagtctatgatattggcaatcctaaaggaattcctattgttgatgaccctgtggttgattggcattattttgatgcacagcccttgaccaggaaggtacaacagcttttctatacagaggacatggcctcaagatttgctgatgggctctgcttattttggaactgtaatgtaccaaaatatcctaataatgcaattgtatgcaggtttgacacacgtgtgcattctgagttcaatttgccaggttgtgatggcggtagtttgtatgttaacaagcacgcttttcatacaccagcatatgatgtgagtgcattccgtgatctgaaacctttaccattcttttattattctactacaccatgtgaagtgcatggtaatggtagtatgatagaggatattgattatgtacccctaaaatctgcagtctgtattacagcttgtaatttagggggcgctgtttgtaggaagcatgctacagagtacagagagtatatggaagcatataatcttgtctctgcatcaggtttccgcctttggtgttataagacctttgatatttataatctctggtctacttttacaaaagttcaaggtttggaaaacattgcttttaatgttgttaaacaaggccattttattggtgttgagggtgaactacctgtagctgtagtcaatgataagatcttcaccaagagtggcgttaatgacatttgtatgtttgagaataaaaccactttgcctactaatatagcttttgaactctatgctaagcgtgctgtacgctcgcatcccgatttcaaattgctacacaatttacaagcagacatttgctacaagttcgtcctttgggattatgaacgtagcaatatttatggtactgctactattggtgtatgtaagtacactgatattgatgttaattcagctttgaatatatgttttgacatacgcgataattgttcattggagaagttcatgtctactcccaatgccatctttatttctgatagaaaaatcaagaaatacccttgtatggtaggtcctgattatgcttacttcaatggtgctatcatccgtgatagtgatgttgttaaacaaccagtgaagttctacttgtataagaaagtcaataatgagtttattgatcctactgagtgtatttacactcagagtcgctcttgtagtgacttcctacccctttctgacatggagaaagactttctatcttttgatagtgatgttttcattaagaagtatggcttggaaaactatgcttttgagcacgtagtctatggagacttctctcatactacgttaggcggtcttcacttgcttattggtttatacaagaagcaacaggaaggtcatattattatggaagaaatgctaaaaggtagctcaactattcataactattttattactgagactaacacagcggcttttaaggcggtgtgttctgttatagatttaaagcttgacgactttgttatgattttaaagagtcaagaccttggcgtagtatccaaggttgtcaaggttcctattgacttaacaatgattgagtttatgttatggtgtaaggatggacaggttcaaaccttctaccctcgactccaggcttctgcagattggaaacctggtcatgcaatgccatccctctttaaagttcaaaatgtaaaccttgaacgttgtgagcttgctaattacaagcaatctattcctatgcctcgcggtgtgcacatgaacatcgctaaatatatgcaattgtgccagtatttaaatacttgcacattagccgtgcctgccaatatgcgtgttatacattttggcgctggttctgataaaggtatcgctcctggtacctcagttttacgacagtggcttcctacagatgccattattatagataatgatttaaatgagttcgtgtcagatgctgacataactttatttggagattgtgtaactgtacgtgtcggccaacaagtggatcttgttatttccgacatgtatgatcctactactaagaatgtaacaggtagtaatgagtcaaaggctttattctttacttacctgtgtaacctcattaataataatcttgctcttggtgggtctgttgctattaaaataacagaacactcttggagcgttgaactttatgaacttatgggaaaatttgcttggtggactgttttctgcaccaatgcaaatgcatcctcatctgaaggattcctcttaggtattaattacttgggtactattaaagaaaatatagatggtggtgctatgcacgccaactatatattttggagaaattccactcctatgaatctgagtacttactcactttttgatttatccaagtttcaattaaaattaaaaggaacaccagttcttcaattaaaggagagtcaaattaacgaactcgtaatatctctcctgtcgcagggtaagttacttatccgtgacaatgatacactcagtgtttctactgatgttcttgttaacacctacagaaagttacgttgaggaagatgccaaaaacattaagaagggcccagcgccattctacccactcgaagacgggaccgccggcgagcagctgcacaaagccatgaagcgctacgccctggtgcccggcaccatcgcctttaccgacgcacatatcgaggtggacattacctacgccgagtacttcgagatgagcgttcggctggcagaagctatgaagcgctatgggctgaatacaaaccatcggatcgtggtgtgcagcgagaatagcttgcagttcttcatgcccgtgttgggtgccctgttcatcggtgtggctgtggccccagctaacgacatctacaacgagcgcgagctgctgaacagcatgggcatcagccagcccaccgtcgtattcgtgagcaagaaagggctgcaaaagatcctcaacgtgcaaaagaagctaccgatcatacaaaagatcatcatcatggatagcaagaccgactaccagggcttccaaagcatgtacaccttcgtgacttcccatttgccacccggcttcaacgagtacgacttcgtgcccgagagcttcgaccgggacaaaaccatcgccctgatcatgaacagtagtggcagtaccggattgcccaagggcgtagccctaccgcaccgcaccgcttgtgtccgattcagtcatgcccgcgaccccatcttcggcaaccagatcatccccgacaccgctatcctcagcgtggtgccatttcaccacggcttcggcatgttcaccacgctgggctacttgatctgcggctttcgggtcgtgctcatgtaccgcttcgaggaggagctattcttgcgcagcttgcaagactataagattcaatctgccctgctggtgcccacactatttagcttcttcgctaagagcactctcatcgacaagtacgacctaagcaacttgcacgagatcgccagcggcggggcgccgctcagcaaggaggtaggtgaggccgtggccaaacgcttccacctaccaggcatccgccagggctacggcctgacagaaacaaccagcgccattctgatcacccccgaaggggacgacaagcctggcgcagtaggcaaggtggtgcccttcttcgaggctaaggtggtggacttggacaccggtaagacactgggtgtgaaccagcgcggcgagctgtgcgtccgtggccccatgatcatgagcggctacgttaacaaccccgaggctacaaacgctctcatcgacaaggacggctggctgcacagcggcgacatcgcctactgggacgaggacgagcacttcttcatcgtggaccggctgaagagcctgatcaaatacaagggctaccaggtagccccagccgaactggagagcatcctgctgcaacaccccaacatcttcgacgccggggtcgccggcctgcccgacgacgatgccggcgagctgcccgccgcagtcgtcgtgctggaacacggtaaaaccatgaccgagaaggagatcgtggactatgtggccagccaggttacaaccgccaagaagctgcgcggtggtgttgtgttcgtggacgaggtgcctaaaggactgaccggcaagttggacgcccgcaagatccgcgagattctcattaaggccaagaagggcggcaagatcgccgtgcagtcgacggtaccgcgggcccgggatccaccggtcgccaccatggtgagcaagggcgaggagctgttcaccggggtggtgcccatcctggtcgagctggacggcgacgtaaacggccacaagttcagcgtgtccggcgagggcgagggcgatgccacctacggcaagctgaccctgaagttcatctgcaccaccggcaagctgcccgtgccctggcccaccctcgtgaccaccctgacctacggcgtgcagtgcttcagccgctaccccgaccacatgaagcagcacgacttcttcaagtccgccatgcccgaaggctacgtccaggagcgcaccatcttcttcaaggacgacggcaactacaagacccgcgccgaggtgaagttcgagggcgacaccctggtgaaccgcatcgagctgaagggcatcgacttcaaggaggacggcaacatcctggggcacaagctggagtacaactacaacagccacaacgtctatatcatggccgacaagcagaagaacggcatcaaggtgaacttcaagatccgccacaacatcgaggacggcagcgtgcagctcgccgaccactaccagcagaacacccccatcggcgacggccccgtgctgctgcccgacaaccactacctgagcacccagtccgccctgagcaaagaccccaacgagaagcgcgatcacatggtcctgctggagttcgtgaccgccgccgggatcactctcggcatggacgagctgtacaagtaattaacgaactattaatgagagttcaaagaccacccactctcttgttagtgttttcactctctcttttggtcactgcatcctcaaaacctctctatgtacctgagcattgtcagaattattctggttgcatgcttagggcttgtattaaaactgcccaagctgatacagctggtctttatacaaattttcgaattgacgtcccatctgcagaatcaactggtactcaatcagtttctgtcgatcttgagtcaacttcaactcatgatggtcctaccgaacatgttactagtgtgaatctttttgacgttggttactcagttaattaacgaactctatggattacgtgtctctgcttaatcaaatttggcagaagtaccttaactcaccgtatactacttgtttgtacatccctaaacccacagctaagtatacacctttagttggcacttcattgcaccctgtgctgtggaactgtcagctatcctttgctggttatactgaatctgctgttaattctacaaaagctttggccaaacaggacgcagctcagcgaatcgcttggttgctacataaggatggaggaatccctgatggatgttccctctacctccggcactcaagtttattcgcgcaaagcgaggaagaggagccattctccaactaagaaactgcgctacgttaagcgtagattttctcttctgcgccatgaagaccttagtgttattgtccaaccaacacactatgtcagggttacattttcagaccccaacatgtggtatctacgttcgggtcatcatttacactcagttcacaattggcttaaaccttatggcggccaacctgtttctgagtaccatattactctagctttgctaaatctcactgatgaagatttagctagagatttttcacccattgcgctctttttgcgcaatgtcagatttgagctacatgagttcgccttgctgcgcaaaactcttgttcttaatgcatcagagatctactgtgctaacatacatagatttaagcctgtgtatagagttaacacggcaatccctactattaaggattggcttctcgttcagggattttccctttaccatagtggcctccctttacatatgtcaatctctaaattgcatgcactggatgatgttactcgcaattacatcattacaatgccatgctttagaacttaccctcaacaaatgtttgttactcctttggccgtagatgttgtctccatacggtcttccaatcagggtaataaacaaattgttcattcttatcccattttacatcatccaggattttaacgaactatggctttctcggcgtctttatttaaacccgtccagctagtcccagtttctcctgcatttcatcgcattgagtctactgactctattgttttcacatacattcctgctagcggctatgtagctgctttagctgtcaatgtgtgtctcattcccctattattactgctacgtcaagatacttgtcgtcgcagcattatcagaactatggttctctatttccttgttctgtataactttttattagccattgtactagtcaatggtgtacattatccaactggaagttgcctgatagccttcttagttatcctcataatactttggtttgtagatagaattcgtttctgtctcatgctgaattcctacattccactgtttgacatgcgttcccactttattcgtgttagtacagtttcttctcatggtatggtccctgtaatacacaccaaaccattatttattagaaacttcgatcagcgttgcagctgttctcgttgtttttatttgcactcttccacttatatagagtgcacttatattagccgttttagtaagattagcctagtttctgtaactgacttctccttaaacggcaatgtttccactgttttcgtgcctgcaacgcgcgattcagttcctcttcacataatcgccccgagctcgcttatcgtttaagcagctctgcgctactatgggtcccgtgtagaggctaatccattagtctctctttggacatatggaaaacgaactatgatcgagcaggatggcctgcatgccggatctccagctgcctgggttgagagactgttcggctatgattgggcccagcagaccatcggctgttctgatgccgccgtgtttagactgagtgcccagggtagacccgtgctgttcgtgaaaaccgatctgtctggcgccctgaacgagctgcaggatgaagccgctagactgagctggctggctacaacaggcgtgccatgtgctgccgtgctggatgtggttacagaggccggaagagactggctgctgctgggagaagttccaggccaggatctgctgagcagtcatctggcccctgccgagaaggtgtccattatggccgatgccatgcggcggctgcacacacttgatcctgccacctgtcctttcgaccaccaagccaagcaccggatcgagagggccagaaccagaatggaagccggcctggtggaccaggacgacctggatgaagaacaccaaggactggccccagctgagctgttcgccagactgaaagccagaatgcccgacggcgaggatctggtggttacacatggggatgcctgcctgcctaacatcatggtggaaaacggccggttcagcggctttatcgactgtggcagactgggcgtcgccgacagatatcaggatatcgccctggccaccagagatatcgccgaagaacttggcggagagtgggccgatagattcctggtgctgtacggaatcgccgctcctgactctcagcggatcgccttctacagactgctggacgagttcttctgagctctttagtaagagtatcttaattgattttaacgaatctcaatttcattgttatggcatcccctgctgcacctcgtgctgtttcctttgccgataacaatgatataacaaatacaaacctatctcgaggtagaggacgtaatccaaaaccacgagctgcaccaaataacactgtctcttggtacactgggcttacccaacacgggaaagtccctcttacctttccacctgggcagggtgtacctcttaatgccaattctacccctgcgcaaaatgctgggtattggcggagacaggacagaaaaattaataccgggaatggaattaagcaactggctcccaggtggtacttctactacactggaactggacccgaagcagcactcccattccgggctgttaaggatggcatcgtttgggtccatgaagatggcgccactgatgctccttcaacttttgggacgcggaaccctaacaatgattcagctattgttacacaattcgcgcccggtactaagcttcctaaaaacttccacattgaggggactggaggcaatagtcaatcatcttcaagagcctctagcttaagcagaaactcttccagatctagttcacaaggttcaagatcaggaaactctacccgcggcacttctccaggtccatctggaatcggagcagtaggaggtgatctactttaccttgatcttctgaacagactacaagcccttgagtctggcaaagtaaagcaatcgcagccaaaagtaatcactaagaaagatgctgctgctgctaaaaataagatgcgccacaagcgcacttccaccaaaagtttcaacatggtgcaagcttttggtcttcgcggaccaggagacctccagggaaactttggtgatcttcaattgaataaactcggcactgaggacccacgttggccccaaattgctgagcttgctcctacagccagtgcttttatgggtatgtcgcaatttaaacttacccatcagaacaatgatgatcatggcaaccctgtgtacttccttcggtacagtggagccattaaacttgacccaaagaatcccaactacaataagtggttggagcttcttgagcaaaatattgatgcctacaaaaccttccctaagaaggaaaagaaacaaaaggcaccaaaagaagaatcaacagaccaaatgtctgaacctccaaaggagcagcgtgtgcaaggtagcatcactcagcgcactcgcacccgtccaagtgttcagcctggtccaatgattgatgttaacactgattagtgtcactcaaagtaacaagatcgcggcaatcgtttgtgtttggcaaccccatctcaccatcgcttgtccactcttgcacagaatggaatcatgttgtaattacagtgcaataaggtaattataacccatttaattgatagctatgctttattaaagtgtgtagctgtagagagaatgttaaagactgtcacctctgcttgattgcaagtgaacagtgccccccgggaagagctctacagtgtgaaatgtaaataaaaaatagctattattcaattagattaggctaattagatgatttgcaaaaaaaaaaaaaaaaaaaaaaaaaagggtcggcatggcatctccacctcctcgcggtccgacctgggcatccgaaggaggacgcacgtccactcggatggctaagggagagcctgcagtagcataaccccttggggcctctaaacgggtcttgaggggttttttg

SEQ ID NO: 29 - DNA, 28570 bp, Artificial Sequence
  T7-mcv-replicon2
taatacgactcactatagatttaagtgaatagcttggctatctcacttcccctcgttctcttgcagaactttgattttaacgaacttaaataaaagccctgttgtttagcgtatcgttgcacttgtctggtgggattgtggcattaatttgcctgctcatctaggcagtggacatatgctcaacactgggtataattctaattgaatactatttttcagttagagcgtcgtgtctcttgtacgtctcggtcacaatacacggtttcgtccggtgcgtggcaattcggggcacatcatgtctttcgtggctggtgtgaccgcgcaaggtgcgcgcggtacgtatcgagcagcgctcaactctgaaaaacatcaagaccatgtgtctctaactgtgccactctgtggttcaggaaacctggttgaaaaactttcaccatggttcatggatggcgaaaatgcctatgaagtggtgaaggccatgttacttaaaaaggagccacttctctatgtgcccatccggctggctggacacactagacacctcccaggtcctcgtgtgtacctggttgagaggctcattgcttgtgaaaatccattcatggttaaccaattggcttatagctctagtgcaaatggcagcctggttggcacaactttgcagggcaagcctattggtatgttcttcccttatgacatcgaacttgtcacaggaaagcaaaatattctcctgcgcaagtatggccgtggtggttatcactacaccccattccactatgagcgagacaacacctcttgccctgagtggatggacgattttgaggcggatcctaaaggcaaatatgcccagaatctgcttaagaagttgattggcggtgatgtcactccagttgaccaatacatgtgtggcgttgatggaaaacccattagtgcctacgcatttttaatggccaaggatggaataaccaaactggctgatgttgaagcggacgtcgcagcacgtgctgatgacgaaggcttcatcacattaaagaacaatctatatagattggtttggcatgttgagcgtaaagacgttccatatcctaagcaatctatttttactattaatagtgtggtccaaaaggatggtgttgaaaacactcctcctcactattttactcttggatgcaaaattttaacgctcaccccacgcaacaagtggagtggcgtttctgacttgtccctcaaacaaaaactcctttacaccttctatggtaaggagtcacttgagaacccaacctacatttaccactccgcattcattgagtgtggaagttgtggtaatgattcctggcttacagggaatgctatccaagggtttgcctgtggatgtggggcatcatatacagctaatgatgtcgaagtccaatcatctggcatgattaagccaaatgctcttctttgtgctacttgcccctttgctaagggtgatagctgttcttctaattgcaaacattcagttgctcagttggttagttacctttctgaacgctgtaatgttattgctgattctaagtccttcacacttatctttggtggcgtagcttacgcctactttggatgtgaggaaggtactatgtactttgtgcctagagctaagtctgttgtctcaaggattggagactccatctttacaggctgtactggctcttggaacaaggtcactcaaattgctaacatgttcttggaacagactcagcattcccttaactttgtgggagagttcgttgtcaacgatgttgtcctcgcaattctctctggaaccacaactaatgttgacaaaatacgccagcttctcaaaggtgtcacccttgacaagttgcgtgattatttagctgactatgacgtagcagtcactgccggcccattcatggataatgctattaatgttggtggtacaggattacagtatgccgccattactgcaccttatgtagttctcactggcttaggtgagtcctttaagaaagttgcaaccataccgtataaggtttgcaactctgttaaggatactctggcttattatgctcacagcgtgttgtacagagtttttccttatgacatggattctggtgtgtcatcctttagtgaactactttttgattgcgttgatctttcagtagcttctacctattttttagtccgcatcttgcaagataagactggcgactttatgtctacaattattacttcctgccaaactgctgttagtaagcttctagatacatgttttgaagctacagaagcaacatttaacttcttgttagatttggcaggattgttcagaatctttctccgcaatgcctatgtgtacacttcacaagggtttgtggtggtcaatggcaaagtttctacacttgtcaaacaagtgttagacttgcttaataagggtatgcaacttttgcatacaaaggtctcctgggctggttctaaaatcattgctgttatctacagcggcagggagtctctaatattcccatcgggaacctattactgtgtcaccactaaggctaagtccgttcaacaagatcttgacgttattttgcctggtgagttttccaagaagcagttaggactgctccaacctactgacaattctacaactgttagtgttactgtatccagtaacatggttgaaactgttgtgggtcaacttgagcaaactaatatgcatagtcctgatgttatagtaggtgactatgtcattattagtgaaaaattgtttgtgcgtagtaaggaagaagacggatttgccttctaccctgcttgcactaatggtcatgctgtaccgactctctttagacttaagggaggtgcacctgtaaaaaaagtagcctttggcggtgatcaagtacatgaggttgctgctgtaagaagtgttactgtcgagtacaacattcatgctgtattagacacactacttgcttcttctagtcttagaacctttgttgtagataagtctttgtcaattgaggagtttgctgacgtagtaaaggaacaagtctcagacttgcttgttaaattactgcgtggaatgccgattccagattttgatttagacgattttattgacgcaccatgctattgctttaacgctgagggtgatgcatcctggtcttctactatgatcttctctcttcaccccgtcgagtgtgacgaggagtgttctgaagtagaggcttcagatttagaagaaggtgaatcagagtgcatttctgagacttcaactgaacaagttgacgtttctcatgagacttctgacgacgagtgggctgctgcagttgatgaagcgttccctctcgatgaagcagaagatgttactgaatctgtgcaagaagaagcacaaccagtagaagtacctgttgaagatattgcgcaggttgtcatagctgacaccttacaggaaactcctgttgtgcctgatactgttgaagtcccaccgcaagtggtgaaacttccgtctgcacctcagactatccagcccgaggtaaaagaagttgcacctgtctatgaggctgataccgaacagacacagaatgttactgttaaacctaagaggttacgcaaaaagcgtaatgttgaccctttgtccaattttgaacataaggttattacagagtgcgttaccatagttttaggtgacgcaattcaagtagccaagtgctatggggagtctgtgttagttaatgctgctaacacacatcttaagcatggcggtggtatcgctggtgctattaatgcggcttcaaaaggggctgtccaaaaagagtcagatgagtatattctggctaaagggccgttacaagtaggagattcagttctcttgcaaggccattctctagctaagaatatcctgcatgtcgtaggcccagatgcccgcgctaaacaggatgtttctctccttagtaagtgctataaggctatgaatgcatatcctcttgtagtcactcctcttgtttcagcaggcatatttggtgtaaaaccagctgtgtcttttgattatcttattagggaggctaagactagagttttagtcgtcgttaattcccaagatgtctataagagtcttaccatagttgacattccacagagtttgactttttcatatgatgggttacgtggcgcaatacgtaaagctaaagattatggttttactgtttttgtgtgcacagacaactctgctaacactaaagttcttaggaacaagggtgttgattatactaagaagtttcttacagttgacggtgtgcaatattattgctacacgtctaaggacactttagatgatatcttacaacaggctaataagtctgttggtattatatctatgcctttgggatatgtgtctcatggtttagacttaatgcaagcagggagtgtcgtgcgtagagttaacgtgccctacgtgtgtctcctagctaataaagagcaagaagctattttgatgtctgaagacgttaagttaaacccttcagaagattttataaagcacgtccgcactaatggtggttacaattcttggcatttagtcgagggtgaactattggtgcaagacttacgcttaaataagctcctgcattggtctgatcaaaccatatgctacaaggatagtgtgttttatgttgtaaagaatagtacagcttttccatttgaaacactttcagcatgtcgtgcgtatttggattcacgcacgacacagcagttaacaatcgaagtcttagtgactgtcgatggtgtaaattttagaacagtcgttctaaataataagaacacttatagatcacagcttggatgcgttttctttaatggtgctgatatttctgacaccattcctgatgagaaacagaatggtcacagtttatatctagcagacaatttgactgctgatgaaacaaaggcgcttaaagagttatatggccccgttgatcctactttcttacacagattctattcacttaaggctgcagtccatgggtggaagatggttgtgtgtgataaggtacgttctctcaaattgagtgataataattgttatcttaatgcagttattatgacacttgatttattgaaggacattaaatttgttatacctgctctacagcatgcatttatgaaacataagggcggtgattcaactgacttcatagccctcattatggcttatggcaattgcacatttggtgctccagatgatgcctctcggttacttcataccgtgcttgcaaaggctgagttatgctgttctgcacgcatggtttggagagagtggtgcaatgtctgtggcataaaagatgttgttctacaaggcttaaaagcttgttgttacgtgggtgtgcaaactgttgaagatctgcgtgctcgcatgacatatgtatgccagtgtggtggtgaacgtcatcggcaattagtcgaacacaccaccccctggttgctgctctcaggcacaccaaatgaaaaattggtgacaacctccacggcgcctgattttgtagcatttaatgtctttcagggcattgaaacggctgttggccattatgttcatgctcgcctgaagggtggtcttattttaaagtttgactctggcaccgttagcaagacttcagactggaagtgcaaggtgacagatgtacttttccccggccaaaaatacagtagcgattgtaatgtcgtacggtattctttggacggtaatttcagaacagaggttgatcccgacctatctgctttctatgttaaggatggtaaatactttacaagtgaaccacccgtaacatattcaccagctacaattttagctggtagtgtctacactaatagctgccttgtatcgtctgatggacaacctggcggtgatgctattagtttgagttttaataaccttttagggtttgattctagtaaaccagtcactaagaaatacacttactccttcttgcctaaagaagacggcgatgtgttgttggctgagtttgacacttatgaccctatttataagaatggtgccatgtataaaggcaaaccaattctttgggtcaataaagcatcttatgatactaatcttaataagttcaatagagctagtttgcgtcaaatttttgacgtagcccccattgaactcgaaaataaattcacacctttgagtgtggagtctacaccagttgaacctccaactgtagatgtggtagcacttcaacaggaaatgacaattgtcaaatgtaagggtttaaataaacctttcgtgaaggacaatgtcagtttcgttgctgatgattcaggtactcccgttgttgagtatctgtctaaagaagacctacatacattgtatgtagaccctaagtatcaagtcattgtcttaaaagacaatgtactttcttctatgcttagattgcacaccgttgagtcaggtgatattaacgttgttgcagcttccggatctttgacacgtaaagtgaagttactatttagggcttcattttatttcaaagaatttgctacccgcactttcactgctaccactgctgtaggtagttgtataaagagtgtagtgcggcatctaggtgttactaaaggcatattgacaggctgttttagttttgccaagatgttatttatgcttccactagcttactttagtgattcaaaactcggcaccacagaggttaaagtgagtgctttgaaaacagccggcgttgtgacaggtaatgttgtaaaacagtgttgcactgctgctgttgatttaagtatggataagttgcgccgtgtggattggaaatcaaccctacggttgttacttatgttatgcacaactatggtattgttgtcttctgtgtatcacttgtatgtcttcaatcaggtcttatcaagtgatgttatgtttgaagatgcccaaggtttgaaaaagttctacaaagaagttagagcttacctaggaatctcttctgcttgtgacggtcttgcttcagcttatagggcgaattcctttgatgtacctacattctgcgcaaaccgttctgcaatgtgtaattggtgcttgattagccaagattccataactcactacccagctcttaagatggttcaaacacatcttagccactatgttcttaacatagattggttgtggtttgcatttgagactggtttggcatacatgctctatacctcggccttcaactggttgttgttggcaggtacattgcattatttctttgcacagacttccatatttgtagactggcggtcatacaattatgctgtgtctagtgccttctggttattcacccacattccaatggcgggtttggtacgaatgtataatttgttagcatgcctttggcttttacgcaagttttatcagcatgtaatcaatggttgcaaagatacggcatgcttgctctgctataagaggaaccgacttactagagttgaagcttctaccgttgtctgtggtggaaaacgtacgttttatatcacagcaaatggcggtatttcattctgtcgtaggcataattggaattgtgtggattgtgacactgcaggtgtggggaataccttcatctgtgaagaagtcgcaaatgacctcactaccgccctacgcaggcctattaacgctacggatagatcacattattatgtggattccgttacagttaaagagactgttgttcagtttaattatcgtagagacggtcaaccattctacgagcggtttcccctctgcgcttttacaaatctagataagttgaagttcaaagaggtctgtaaaactactactggtatacctgaatacaactttatcatctacgactcatcagatcgtggccaggaaagtttagctaggtctgcatgtgtttattattctcaagtcttgtgtaaatcaattcttttggttgactcaagtttggttacttctgttggtgattctagtgaaatcgccactaaaatgtttgattcctttgttaatagtttcgtctcgctgtataatgtcacacgcgataagttggaaaaacttatctctactgctcgtgatggcgtaaggcgaggcgataacttccatagtgtcttaacaacattcattgacgcagcacgaggccccgcaggtgtggagtctgatgttgagaccaatgaaattgttgactctgtgcagtatgctcataaacatgacatacaaattactaatgagagctacaataattatgtaccctcatatgttaaacctgatagtgtgtctaccagcgatttaggtagtctcattgattgtaatgcggcttcagttaaccaaattgtcttgcgtaattctaatggtgcttgcatttggaacgctgctgcatatatgaaactctcggatgcacttaaacgacagattcgcattgcatgccgtaagtgtaatttagctttccggttaaccacctcaaagctacgcgctaatgataatatcttatcagttagattcactgctaacaaaattgttggtggtgctcctacatggtttaatgcgttgcgtgactttacgttaaagggttatgttcttgctaccattattgtgtttctgtgtgctgtactgatgtatttgtgtttacctacattttctatggcacctgttgaattttatgaagaccgcatcttggactttaaagttcttgataatggtatcattagggatgtaaatcctgatgataagtgctttgctaataagcaccggtccttcacacaatggtatcatgagcatgttggtggtgtctatgacaactctatcacatgcccattgacagttgcagtaattgctggagttgctggtgctcgcattccagacgtacctactacattggcttgggtgaacaatcagataattttctttgtttctcgagtctttgctaatacaggcagtgtttgctacactcctatagatgagataccctataagagtttctctgatagtggttgcattcttccatctgagtgcactatgtttagggatgcagagggccgtatgacaccatactgccatgatcctactgttttgcctggggcttttgcgtacagtcagatgaggcctcatgttcgttacgacttgtatgatggtaacatgtttattaaatttcctgaagtagtatttgaaagtacacttaggattactagaactctgtcaactcagtactgccggttcggtagttgtgagtatgcacaagagggtgtttgtattaccacaaatggctcgtgggccatttttaatgaccaccatcttaatagacctggtgtctattgtggctctgattttattgacattgtcaggcggttagcagtatcactgttccagcctattacttatttccaattgactacctcattggtcttgggtataggtttgtgtgcgttcctgactttgctcttctattatattaataaagtaaaacgtgcttttgcagattacacccagtgtgctgtaattgctgttgttgctgctgttcttaatagcttgtgcatctgctttgttacctctataccattgtgtatagtaccttacactgcattgtactattatgctacattctattttactaatgagcctgcatttattatgcatgtttcttggtacattatgttcgggcctatcgttcccatatggatgacctgcgtctatacagttgcaatgtgctttagacacttcttctgggttttagcttattttagtaagaaacatgtagaagtttttactgatggtaagcttaattgtagtttccaggacgctgcctctaatatctttgttattaacaaggacacttatgcagctcttagaaactctttaactaatgatgcctattcacgatttttggggttgtttaacaagtataagtacttctctggtgctatggaaacagccgcttatcgtgaagctgcagcatgtcatcttgctaaagccttacaaacatacagcgagactggtagtgatcttctttaccaaccacccaactgtagcataacctctggcgtgttgcaaagcggtttggtgaaaatgtcacatcccagtggagatgttgaggcttgtatggttcaggttacctgcggtagcatgactcttaatggtctttggcttgacaacacagtctggtgcccacgacacgtaatgtgcccggctgaccagttgtctgatcctaattatgatgccttgttgatttctatgactaatcatagtttcagtgtgcaaaaacacattggcgctccagcaaacttgcgtgttgttggtcatgccatgcaaggcactcttttgaagttgactgtcgatgttgctaaccctagcactccagcctacacttttacaacagtgaaacctggcgcagcatttagtgtgttagcatgctataatggtcgtccgactggtacattcactgttgtaatgcgccctaactacacaattaagggttcctttctgtgtggttcttgtggtagtgttggttacaccaaggagggtagtgtgatcaatttctgttacatgcatcaaatggaacttgctaatggtacacataccggttcagcatttgatggtactatgtatggtgcctttatggataaacaagtgcaccaagttcagttaacagacaaatactgcagtgttaatgtagtagcttggctttacgcagcaatacttaatggttgcgcttggtttgtaaaacctaatcgcactagtgttgtttcttttaatgaatgggctcttgccaaccaattcactgaatttgttggcactcaatccgttgacatgttagctgtcaaaacaggcgttgctattgaacagctgctttatgcgatccaacaactgtatactgggttccagggaaagcaaatccttggcagtaccatgttggaagatgaattcacacctgaggatgttaatatgcagattatgggtgtggttatgcagagtggtgtgagaaaagttacatatggtactgcgcattggttgtttgcgacccttgtctcaacctatgtgataatcttacaagccactaaatttactttgtggaactacttgtttgagactattcccacacagttgttcccactcttatttgtgactatggccttcgttatgttgttggttaaacacaaacacacctttttgacacttttcttgttgcctgtggctatttgtttgacttatgcaaacatagtctacgagcccactactcccatttcgtcagcgctgattgcagttgcaaattggcttgcccccactaatgcttatatgcgcactacacatactgatattggtgtctacattagtatgtcacttgtattagtcattgtagtgaagagattgtacaacccatcactttctaactttgcgttagcattgtgcagtggtgtaatgtggttgtacacttatagcattggagaagcctcaagccccattgcctatctggtttttgtcactacactcactagtgattatacgattacagtctttgttactgtcaaccttgcaaaagtttgcacttatgccatctttgcttactcaccacagcttacacttgtgtttccggaagtgaagatgatacttttattatacacatgtttaggtttcatgtgtacttgctattttggtgtcttctctcttttgaaccttaagcttagagcacctatgggtgtctatgactttaaggtctcaacacaagagttcagattcatgactgctaacaatctaactgcacctagaaattcttgggaggctatggctctgaactttaagttaataggtattggcggtacaccttgtataaaggttgctgctatgcagtctaaacttacagatcttaaatgcacatctgtggttctcctctctgtgctccaacagttacacttagaggctaatagtagggcctgggctttctgtgttaaatgccataatgatatattggcagcaacagaccccagtgaggctttcgagaaattcgtaagtctctttgctactttaatgactttttctggtaatgtagatcttgatgcgttagctagtgatatttttgacactcctagcgtacttcaagctactctttctgagttttcacacttagctacctttgctgagttggaagctgcgcagaaagcctatcaggaagctatggactctggtgacacctcaccacaagttcttaaggctttgcagaaggctgttaatatagctaaaaacgcctatgagaaggataaggcagtggcccgtaagttagaacgtatggctgatcaggctatgacttctatgtataagcaagcacgtgctgaagacaagaaagcaaaaattgtcagtgctatgcaaactatgttgtttggtatgattaagaagctcgacaacgatgttcttaatggtatcatttctaacgctaggaatggttgtatacctcttagtgtcatcccactgtgtgcttcaaataaacttcgcgttgtaattcctgacttcaccgtctggaatcaggtagtcacatatccctcgcttaactacgctggggctttgtgggacattacagttataaacaatgtggacaatgaaattgttaagtcttcagatgttgtagacagcaatgaaaatttaacatggccacttgttttagaatgcactagggcatccacttctgccgttaagttgcaaaataatgagatcaaaccttcaggtctaaaaaccatggttgtgtctgcgggtcaagagcaaactaactgtaatactagttccttagcttattacgaacctgtgcagggtcgtaaaatgctgatggctcttctttctgataatgcctatctcaaatgggcgcgtgttgaaggtaaggacggatttgtcagtgtagagctacaacctccttgcaaattcttgattgcgggaccaaaaggacctgaaatccgatatctctattttgttaaaaatcttaacaaccttcatcgcgggcaagtgttagggcacattgctgcgactgttagattgcaagctggttctaacaccgagtttgcctctaattcctcggtgttgtcacttgttaacttcaccgttgatcctcaaaaagcttatctcgatttcgtcaatgcgggaggtgccccattgacaaattgtgttaagatgcttactcctaaaactggtacaggtatagctatatctgttaaaccagagagtacagctgatcaagagacttatggtggagcttcagtgtgtctctattgccgtgcgcatatagaacatcctgatgtctctggtgtttgtaaatataagggtaagtttgtccaaatccctgctcagtgtgtccgtgaccctgtgggattttgtttgtcaaataccccctgtaatgtctgtcaatattggattggatatgggtgcaattgtgactcgcttaggcaagcagcactgccccaatctaaagattccaattttttaaacgagtccggggttctattgtaaatgcccgaatagaaccctgttcaagtggtttgtccactgatgtcgtctttagggcatttgacatctgcaactataaggctaaggttgctggtattggaaaatactacaagactaatacttgtaggtttgtagaattagatgaccaagggcatcatttagactcctattttgtcgttaagaggcatactatggagaattatgaactagagaagcactgttacgacttgttacgtgactgtgatgctgtagctccccatgatttcttcatctttgatgtagacaaagttaaaacacctcatattgtacgtcagcgtttaactgagtacactatgatggatcttgtatatgccctgaggcactttgatcaaaatagcgaagtgcttaaggctatcttagtgaagtatggttgctgtgatgttacctactttgaaaataaactctggtttgattttgttgaaaatcccagtgttattggtgtttatcataaacttggagaacgtgtacgccaagctatcttaaacactgttaaattttgtgaccacatggtcaaggctggtttagtcggtgtgctcacactagacaaccaggaccttaatggcaagtggtatgattttggtgacttcgtaatcactcaacctggttcaggagtagctatagttgatagctactattcttatttgatgcctgtgctctcaatgaccgattgtctggccgctgagacacatagggattgtgattttaataaaccactcattgagtggccacttactgagtatgattttactgattataaggtacaactctttgagaagtactttaaatattgggatcagacgtatcacgcaaattgcgttaattgtactgatgaccgttgtgtgttacattgtgctaatttcaatgtattgtttgctatgaccatgcctaagacttgtttcggacccatagtccgaaagatctttgttgatggcgtgccatttgtagtatcttgtggttatcactacaaagaattaggtttagtcatgaatatggatgttagtctccatagacataggctctctcttaaggagttgatgatgtatgccgctgatccagccatgcacattgcctcctctaacgcttttcttgatttgaggacatcatgttttagtgtcgctgcacttacaactggtttgacttttcaaactgtgcggcctggcaattttaaccaagacttctatgatttcgtggtatctaaaggtttctttaaggagggctcttcagtgacgctcaaacattttttctttgctcaagatggtaatgctgctattacagattataattactattcttataatctgcctactatgtgtgacatcaaacaaatgttgttctgcatggaagttgtaaacaagtacttcgaaatctatgacggtggttgtcttaatgcttctgaagtggttgttaataatttagacaagagtgctggccatccttttaataagtttggcaaagctcgtgtctattatgagagcatgtcttaccaggagcaagatgaactttttgccatgacaaagcgtaacgtcattcctaccatgactcaaatgaatctaaaatatgctattagtgctaagaatagagctcgcactgttgcaggcgtgtccatacttagcacaatgactaatcgccagtaccatcagaaaatgcttaagtccatggctgcaactcgtggagcgacttgcgtcattggtactacaaagttctacggtggctgggatttcatgcttaaaacattgtacaaagatgttgataatccgcatcttatgggttgggattaccctaagtgtgatagagctatgcctaatatgtgtagaatcttcgcttcactcatattagctcgtaaacatggcacttgttgtactacaagggacagattttatcgcttggcaaatgagtgtgctcaggtgctaagcgaatatgttctatgtggtggtggttactacgtcaaacctggaggtaccagtagcggagatgccaccactgcatatgccaatagtgtctttaacattttgcaggcgacaactgctaatgtcagtgcacttatgggtgctaatggcaacaagattgttgacaaagaagttaaagacatgcagtttgatttgtatgtcaatgtttacaggagcactagcccagaccccaaatttgttgataaatactatgcttttcttaataagcacttttctatgatgatactgtctgatgacggtgtcgtttgctataatagtgattatgcagctaagggttacattgctggaatacagaattttaaggaaacgctgtattatcagaacaatgtctttatgtctgaagctaaatgctgggtggaaaccgatctgaagaaagggccacatgaattctgttcacagcatacgctttatattaaggatggcgacgatggttacttccttccttatccagacccttcaagaattttgtctgccggttgctttgtagatgatatcgttaagactgacggtacactcatggtagagcggtttgtgtctttggctatagatgcttaccctctcacaaagcatgaagatatagaataccagaatgtattctgggtctacttacagtatatagaaaaactgtataaagaccttacaggacacatgcttgacagttattctgtcatgctatgtggtgataattctgctaagttttgggaagaggcattctatagagatctctatagttcgcctaccactttgcaggctgtcggttcatgcgttgtatgccattcacagacttccctacgctgtgggacatgcatccgtagaccatttctctgctgtaaatgctgctatgatcatgttatagcaactccacataagatggttttgtctgtttctccttacgtttgtaatgcccctggttgtggcgtttcagacgttactaagctatatttaggtggtatgagctacttttgtgtagatcatagacctgtgtgtagttttccactttgcgctaatggtcttgtattcggcttatacaagaatatgtgcacaggtagtccttctatagttgaatttaataggttggctacctgtgactggactgaaagtggtgattacacccttgccaatactacaacagaaccactcaaactttttgctgctgagactttacgtgccactgaagaggcgtctaagcagtcttatgctattgccaccatcaaagaaattgttggtgagcgccaactattacttgtgtgggaggctggcaagtccaaaccaccactcaatcgtaattatgtttttactggttatcatataaccaaaaatagtaaagtgcagctcggtgagtacattttcgagcgcattgattatagtgatgctgtatcctacaagtctagtacaacgtataaactgactgtaggtgacatcttcgtacttacctctcactctgtggctaccttgacggcgcccacaattgtgaatcaagagaggtatgttaaaattactgggttgtacccaaccattacggtacctgaagagttcgcaagtcatgttgccaacttccaaaaatcaggttatagtaaatatgtcactgttcagggaccacctggcactggcaaaagtcattttgctatagggttagcgatttactaccctacagcacgtgttgtttatacagcatgttcacacgcagctgttgatgctttgtgtgaaaaagcttttaaatatttgaacattgctaaatgttcccgtatcattcctgcaaaggcacgtgttgagtgctatgacaggtttaaagttaatgagacaaattctcaatatttgtttagtactattaatgctctaccagaaacttctgccgatattctggtggttgatgaggttagtatgtgcactaattatgatctttcaattattaatgcacgtattaaagctaagcacattgtctatgtaggagatccagcacagttgccagctcctaggactttgttgactagaggcacattggaaccagaaaatttcaatagtgtcactagattgatgtgtaacttaggtcctgacatatttttaagtatgtgctacaggtgtcctaaggaaatagtaagcactgtgagcgctcttgtctacaataataaattgttagccaagaaggagctttcaggccagtgctttaaaatactctataagggcaatgtgacgcatgatgctagctctgccattaatagaccacaactcacatttgtgaagaattttattactgccaatccggcatggagtaaggcagtctttatttcgccttacaattcacagaatgctgtgtctcgttcaatgctgggtcttaccactcagactgttgattcctcacagggttcagaataccagtacgttatcttctgtcaaacagcagatacggcacatgctaacaacattaacagatttaatgttgcaatcactcgtgcccaaaaaggtattctttgtgttatgacatctcaggcactctttgagtccttagagtttactgaattgtcttttactaattacaagctccagtctcagattgtaactggcctttttaaagattgctctagagaaacttctggcctctcacctgcttatgcaccaacatatgttagtgttgatgacaagtataagacgagtgatgagctttgcgtgaatcttaatttacccgcaaatgtcccatactctcgtgttatttccaggatgggctttaaactcgatgcaacagttcctggatatcctaagcttttcattactcgtgaagaggctgtaaggcaagttcgaagctggataggcttcgatgttgagggtgctcatgcttcccgtaatgcatgtggcaccaatgtgcctctacaattaggattttcaactggtgtgaactttgttgttcagccagttggtgttgtagacactgagtggggtaacatgttaacgggcattgctgcacgtcctccaccaggtgaacagtttaagcacctcgtgcctcttatgcataagggggctgcgtggcctattgttagacgacgtatagtgcaaatgttgtcagacactttagacaaattgtctgattactgtacgtttgtttgttgggctcatggctttgaattaacgtctgcatcatacttttgcaagataggtaaggaacagaagtgttgcatgtgcaatagacgcgctgcagcgtactcttcacctctgcaatcttatgcctgctggactcattcctgcggttatgattatgtctacaaccctttctttgtcgatgttcaacagtggggttatgtaggcaatcttgctactaatcacgatcgttattgctctgtccatcaaggagctcatgtggcttctaatgatgcaataatgactcgttgtttagctattcattcttgttttatagaacgtgtggattgggatatagagtatccttatatctcacatgaaaagaaattgaattcctgttgtagaatcgttgagcgcaacgtcgtacgtgctgctcttcttgccggttcatttgacaaagtctatgatattggcaatcctaaaggaattcctattgttgatgaccctgtggttgattggcattattttgatgcacagcccttgaccaggaaggtacaacagcttttctatacagaggacatggcctcaagatttgctgatgggctctgcttattttggaactgtaatgtaccaaaatatcctaataatgcaattgtatgcaggtttgacacacgtgtgcattctgagttcaatttgccaggttgtgatggcggtagtttgtatgttaacaagcacgcttttcatacaccagcatatgatgtgagtgcattccgtgatctgaaacctttaccattcttttattattctactacaccatgtgaagtgcatggtaatggtagtatgatagaggatattgattatgtacccctaaaatctgcagtctgtattacagcttgtaatttagggggcgctgtttgtaggaagcatgctacagagtacagagagtatatggaagcatataatcttgtctctgcatcaggtttccgcctttggtgttataagacctttgatatttataatctctggtctacttttacaaaagttcaaggtttggaaaacattgcttttaatgttgttaaacaaggccattttattggtgttgagggtgaactacctgtagctgtagtcaatgataagatcttcaccaagagtggcgttaatgacatttgtatgtttgagaataaaaccactttgcctactaatatagcttttgaactctatgctaagcgtgctgtacgctcgcatcccgatttcaaattgctacacaatttacaagcagacatttgctacaagttcgtcctttgggattatgaacgtagcaatatttatggtactgctactattggtgtatgtaagtacactgatattgatgttaattcagctttgaatatatgttttgacatacgcgataattgttcattggagaagttcatgtctactcccaatgccatctttatttctgatagaaaaatcaagaaatacccttgtatggtaggtcctgattatgcttacttcaatggtgctatcatccgtgatagtgatgttgttaaacaaccagtgaagttctacttgtataagaaagtcaataatgagtttattgatcctactgagtgtatttacactcagagtcgctcttgtagtgacttcctacccctttctgacatggagaaagactttctatcttttgatagtgatgttttcattaagaagtatggcttggaaaactatgcttttgagcacgtagtctatggagacttctctcatactacgttaggcggtcttcacttgcttattggtttatacaagaagcaacaggaaggtcatattattatggaagaaatgctaaaaggtagctcaactattcataactattttattactgagactaacacagcggcttttaaggcggtgtgttctgttatagatttaaagcttgacgactttgttatgattttaaagagtcaagaccttggcgtagtatccaaggttgtcaaggttcctattgacttaacaatgattgagtttatgttatggtgtaaggatggacaggttcaaaccttctaccctcgactccaggcttctgcagattggaaacctggtcatgcaatgccatccctctttaaagttcaaaatgtaaaccttgaacgttgtgagcttgctaattacaagcaatctattcctatgcctcgcggtgtgcacatgaacatcgctaaatatatgcaattgtgccagtatttaaatacttgcacattagccgtgcctgccaatatgcgtgttatacattttggcgctggttctgataaaggtatcgctcctggtacctcagttttacgacagtggcttcctacagatgccattattatagataatgatttaaatgagttcgtgtcagatgctgacataactttatttggagattgtgtaactgtacgtgtcggccaacaagtggatcttgttatttccgacatgtatgatcctactactaagaatgtaacaggtagtaatgagtcaaaggctttattctttacttacctgtgtaacctcattaataataatcttgctcttggtgggtctgttgctattaaaataacagaacactcttggagcgttgaactttatgaacttatgggaaaatttgcttggtggactgttttctgcaccaatgcaaatgcatcctcatctgaaggattcctcttaggtattaattacttgggtactattaaagaaaatatagatggtggtgctatgcacgccaactatatattttggagaaattccactcctatgaatctgagtacttactcactttttgatttatccaagtttcaattaaaattaaaaggaacaccagttcttcaattaaaggagagtcaaattaacgaactcgtaatatctctcctgtcgcagggtaagttacttatccgtgacaacgatacactcagtgtttctactgacgttcttgttaacacctacagaaagttacgttgatggaagatgccaaaaacattaagaagggcccagcgccattctacccactcgaagacgggaccgccggcgagcagctgcacaaagccatgaagcgctacgccctggtgcccggcaccatcgcctttaccgacgcacatatcgaggtggacattacctacgccgagtacttcgagatgagcgttcggctggcagaagctatgaagcgctatgggctgaatacaaaccatcggatcgtggtgtgcagcgagaatagcttgcagttcttcatgcccgtgttgggtgccctgttcatcggtgtggctgtggccccagctaacgacatctacaacgagcgcgagctgctgaacagcatgggcatcagccagcccaccgtcgtattcgtgagcaagaaagggctgcaaaagatcctcaacgtgcaaaagaagctaccgatcatacaaaagatcatcatcatggatagcaagaccgactaccagggcttccaaagcatgtacaccttcgtgacttcccatttgccacccggcttcaacgagtacgacttcgtgcccgagagcttcgaccgggacaaaaccatcgccctgatcatgaacagtagtggcagtaccggattgcccaagggcgtagccctaccgcaccgcaccgcttgtgtccgattcagtcatgcccgcgaccccatcttcggcaaccagatcatccccgacaccgctatcctcagcgtggtgccatttcaccacggcttcggcatgttcaccacgctgggctacttgatctgcggctttcgggtcgtgctcatgtaccgcttcgaggaggagctattcttgcgcagcttgcaagactataagattcaatctgccctgctggtgcccacactatttagcttcttcgctaagagcactctcatcgacaagtacgacctaagcaacttgcacgagatcgccagcggcggggcgccgctcagcaaggaggtaggtgaggccgtggccaaacgcttccacctaccaggcatccgccagggctacggcctgacagaaacaaccagcgccattctgatcacccccgaaggggacgacaagcctggcgcagtaggcaaggtggtgcccttcttcgaggctaaggtggtggacttggacaccggtaagacactgggtgtgaaccagcgcggcgagctgtgcgtccgtggccccatgatcatgagcggctacgttaacaaccccgaggctacaaacgctctcatcgacaaggacggctggctgcacagcggcgacatcgcctactgggacgaggacgagcacttcttcatcgtggaccggctgaagagcctgatcaaatacaagggctaccaggtagccccagccgaactggagagcatcctgctgcaacaccccaacatcttcgacgccggggtcgccggcctgcccgacgacgatgccggcgagctgcccgccgcagtcgtcgtgctggaacacggtaaaaccatgaccgagaaggagatcgtggactatgtggccagccaggttacaaccgccaagaagctgcgcggtggtgttgtgttcgtggacgaggtgcctaaaggactgaccggcaagttggacgcccgcaagatccgcgagattctcattaaggccaagaagggcggcaagatcgccgtgcagtcgacggtaccgcgggcccgggatccaccggtcgccaccatggtgagcaagggcgaggagctgttcaccggggtggtgcccatcctggtcgagctggacggcgacgtaaacggccacaagttcagcgtgtccggcgagggcgagggcgatgccacctacggcaagctgaccctgaagttcatctgcaccaccggcaagctgcccgtgccctggcccaccctcgtgaccaccctgacctacggcgtgcagtgcttcagccgctaccccgaccacatgaagcagcacgacttcttcaagtccgccatgcccgaaggctacgtccaggagcgcaccatcttcttcaaggacgacggcaactacaagacccgcgccgaggtgaagttcgagggcgacaccctggtgaaccgcatcgagctgaagggcatcgacttcaaggaggacggcaacatcctggggcacaagctggagtacaactacaacagccacaacgtctatatcatggccgacaagcagaagaacggcatcaaggtgaacttcaagatccgccacaacatcgaggacggcagcgtgcagctcgccgaccactaccagcagaacacccccatcggcgacggccccgtgctgctgcccgacaaccactacctgagcacccagtccgccctgagcaaagaccccaacgagaagcgcgatcacatggtcctgctggagttcgtgaccgccgccgggatcactctcggcatggacgagctgtacaagtaattaacgaactattaatgagagttcaaagaccacccactctcttgttagtgttttcactctctcttttggtcactgcatcctcaaaacctctctatgtacctgagcattgtcagaattattctggttgcatgcttagggcttgtattaaaactgcccaagctgatacagctggtctttatacaaattttcgaattgacgtcccatctgcagaatcaactggtactcaatcagtttctgtcgatcttgagtcaacttcaactcatgatggtcctaccgaacatgttactagtgtgaatctttttgacgttggttactcagttaattaacgaactctatggattacgtgtctctgcttaatcaaatttggcagaagtaccttaactcaccgtatactacttgtttgtacatccctaaacccacagctaagtatacacctttagttggcacttcattgcaccctgtgctgtggaactgtcagctatcctttgctggttatactgaatctgctgttaattctacaaaagctttggccaaacaggacgcagctcagcgaatcgcttggttgctacataaggatggaggaatccctgatggatgttccctctacctccggcactcaagtttattcgcgcaaagcgaggaagaggagccattctccaactaagaaactgcgctacgttaagcgtagattttctcttctgcgccatgaagaccttagtgttattgtccaaccaacacactatgtcagggttacattttcagaccccaacatgtggtatctacgttcgggtcatcatttacactcagttcacaattggcttaaaccttatggcggccaacctgtttctgagtaccatattactctagctttgctaaatctcactgatgaagatttagctagagatttttcacccattgcgctctttttgcgcaatgtcagatttgagctacatgagttcgccttgctgcgcaaaactcttgttcttaatgcatcagagatctactgtgctaacatacatagatttaagcctgtgtatagagttaacacggcaatccctactattaaggattggcttctcgttcagggattttccctttaccatagtggcctccctttacatatgtcaatctctaaattgcatgcactggatgatgttactcgcaattacatcattacaatgccatgctttagaacttaccctcaacaaatgtttgttactcctttggccgtagatgttgtctccatacggtcttccaatcagggtaataaacaaattgttcattcttatcccattttacatcatccaggattttaacgaactatggctttctcggcgtctttatttaaacccgtccagctagtcccagtttctcctgcatttcatcgcattgagtctactgactctattgttttcacatacattcctgctagcggctatgtagctgctttagctgtcaatgtgtgtctcattcccctattattactgctacgtcaagatacttgtcgtcgcagcattatcagaactatggttctctatttccttgttctgtataactttttattagccattgtactagtcaatggtgtacattatccaactggaagttgcctgatagccttcttagttatcctcataatactttggtttgtagatagaattcgtttctgtctcatgctgaattcctacattccactgtttgacatgcgttcccactttattcgtgttagtacagtttcttctcatggtatggtccctgtaatacacaccaaaccattatttattagaaacttcgatcagcgttgcagctgttctcgttgtttttatttgcactcttccacttatatagagtgcacttatattagccgttttagtaagattagcctagtttctgtaactgacttctccttaaacggcaatgtttccactgttttcgtgcctgcaacgcgcgattcagttcctcttcacataatcgccccgagctcgcttatcgtttaagcagctctgcgctactatgggtcccgtgtagaggctaatccattagtctctctttggacatatggaaaacgaactatgatcgagcaggatggcctgcatgccggatctccagctgcctgggttgagagactgttcggctatgattgggcccagcagaccatcggctgttctgatgccgccgtgtttagactgagtgcccagggtagacccgtgctgttcgtgaaaaccgatctgtctggcgccctgaacgagctgcaggatgaagccgctagactgagctggctggctacaacaggcgtgccatgtgctgccgtgctggatgtggttacagaggccggaagagactggctgctgctgggagaagttccaggccaggatctgctgagcagtcatctggcccctgccgagaaggtgtccattatggccgatgccatgcggcggctgcacacacttgatcctgccacctgtcctttcgaccaccaagccaagcaccggatcgagagggccagaaccagaatggaagccggcctggtggaccaggacgacctggatgaagaacaccaaggactggccccagctgagctgttcgccagactgaaagccagaatgcccgacggcgaggatctggtggttacacatggggatgcctgcctgcctaacatcatggtggaaaacggccggttcagcggctttatcgactgtggcagactgggcgtcgccgacagatatcaggatatcgccctggccaccagagatatcgccgaagaacttggcggagagtgggccgatagattcctggtgctgtacggaatcgccgctcctgactctcagcggatcgccttctacagactgctggacgagttcttctgagctctttagtaagagtatcttaattgattttaacgaatctcaatttcattgttatggcatcccctgctgcacctcgtgctgtttcctttgccgataacaatgatataacaaatacaaacctatctcgaggtagaggacgtaatccaaaaccacgagctgcaccaaataacactgtctcttggtacactgggcttacccaacacgggaaagtccctcttacctttccacctgggcagggtgtacctcttaatgccaattctacccctgcgcaaaatgctgggtattggcggagacaggacagaaaaattaataccgggaatggaattaagcaactggctcccaggtggtacttctactacactggaactggacccgaagcagcactcccattccgggctgttaaggatggcatcgtttgggtccatgaagatggcgccactgatgctccttcaacttttgggacgcggaaccctaacaatgattcagctattgttacacaattcgcgcccggtactaagcttcctaaaaacttccacattgaggggactggaggcaatagtcaatcatcttcaagagcctctagcttaagcagaaactcttccagatctagttcacaaggttcaagatcaggaaactctacccgcggcacttctccaggtccatctggaatcggagcagtaggaggtgatctactttaccttgatcttctgaacagactacaagcccttgagtctggcaaagtaaagcaatcgcagccaaaagtaatcactaagaaagatgctgctgctgctaaaaataagatgcgccacaagcgcacttccaccaaaagtttcaacatggtgcaagcttttggtcttcgcggaccaggagacctccagggaaactttggtgatcttcaattgaataaactcggcactgaggacccacgttggccccaaattgctgagcttgctcctacagccagtgcttttatgggtatgtcgcaatttaaacttacccatcagaacaatgatgatcatggcaaccctgtgtacttccttcggtacagtggagccattaaacttgacccaaagaatcccaactacaataagtggttggagcttcttgagcaaaatattgatgcctacaaaaccttccctaagaaggaaaagaaacaaaaggcaccaaaagaagaatcaacagaccaaatgtctgaacctccaaaggagcagcgtgtgcaaggtagcatcactcagcgcactcgcacccgtccaagtgttcagcctggtccaatgattgatgttaacactgattagtgtcactcaaagtaacaagatcgcggcaatcgtttgtgtttggcaaccccatctcaccatcgcttgtccactcttgcacagaatggaatcatgttgtaattacagtgcaataaggtaattataacccatttaattgatagctatgctttattaaagtgtgtagctgtagagagaatgttaaagactgtcacctctgcttgattgcaagtgaacagtgccccccgggaagagctctacagtgtgaaatgtaaataaaaaatagctattattcaattagattaggctaattagatgatttgcaaaaaaaaaaaaaaaaaaaaaaaaaagggtcggcatggcatctccacctcctcgcggtccgacctgggcatccgaaggaggacgcacgtccactcggatggctaagggagagcctgcagtagcataaccccttggggcctctaaacgggtcttgaggggttttttg

SEQ ID NO: 30 - DNA, 28638 bp, Artificial Sequence
  T7-mcv-replicon3
taatacgactcactatagatttaagtgaatagcttggctatctcacttcccctcgttctcttgcagaactttgattttaacgaacttaaataaaagccctgttgtttagcgtatcgttgcacttgtctggtgggattgtggcattaatttgcctgctcatctaggcagtggacatatgctcaacactgggtataattctaattgaatactatttttcagttagagcgtcgtgtctcttgtacgtctcggtcacaatacacggtttcgtccggtgcgtggcaattcggggcacatcatgtctttcgtggctggtgtgaccgcgcaaggtgcgcgcggtacgtatcgagcagcgctcaactctgaaaaacatcaagaccatgtgtctctaactgtgccactctgtggttcaggaaacctggttgaaaaactttcaccatggttcatggatggcgaaaatgcctatgaagtggtgaaggccatgttacttaaaaaggagccacttctctatgtgcccatccggctggctggacacactagacacctcccaggtcctcgtgtgtacctggttgagaggctcattgcttgtgaaaatccattcatggttaaccaattggcttatagctctagtgcaaatggcagcctggttggcacaactttgcagggcaagcctattggtatgttcttcccttatgacatcgaacttgtcacaggaaagcaaaatattctcctgcgcaagtatggccgtggtggttatcactacaccccattccactatgagcgagacaacacctcttgccctgagtggatggacgattttgaggcggatcctaaaggcaaatatgcccagaatctgcttaagaagttgattggcggtgatgtcactccagttgaccaatacatgtgtggcgttgatggaaaacccattagtgcctacgcatttttaatggccaaggatggaataaccaaactggctgatgttgaagcggacgtcgcagcacgtgctgatgacgaaggcttcatcacattaaagaacaatctatatagattggtttggcatgttgagcgtaaagacgttccatatcctaagcaatctatttttactattaatagtgtggtccaaaaggatggtgttgaaaacactcctcctcactattttactcttggatgcaaaattttaacgctcaccccacgcaacaagtggagtggcgtttctgacttgtccctcaaacaaaaactcctttacaccttctatggtaaggagtcacttgagaacccaacctacatttaccactccgcattcattgagtgtggaagttgtggtaatgattcctggcttacagggaatgctatccaagggtttgcctgtggatgtggggcatcatatacagctaatgatgtcgaagtccaatcatctggcatgattaagccaaatgctcttctttgtgctacttgcccctttgctaagggtgatagctgttcttctaattgcaaacattcagttgctcagttggttagttacctttctgaacgctgtaatgttattgctgattctaagtccttcacacttatctttggtggcgtagcttacgcctactttggatgtgaggaaggtactatgtactttgtgcctagagctaagtctgttgtctcaaggattggagactccatctttacaggctgtactggctcttggaacaaggtcactcaaattgctaacatgttcttggaacagactcagcattcccttaactttgtgggagagttcgttgtcaacgatgttgtcctcgcaattctctctggaaccacaactaatgttgacaaaatacgccagcttctcaaaggtgtcacccttgacaagttgcgtgattatttagctgactatgacgtagcagtcactgccggcccattcatggataatgctattaatgttggtggtacaggattacagtatgccgccattactgcaccttatgtagttctcactggcttaggtgagtcctttaagaaagttgcaaccataccgtataaggtttgcaactctgttaaggatactctggcttattatgctcacagcgtgttgtacagagtttttccttatgacatggattctggtgtgtcatcctttagtgaactactttttgattgcgttgatctttcagtagcttctacctattttttagtccgcatcttgcaagataagactggcgactttatgtctacaattattacttcctgccaaactgctgttagtaagcttctagatacatgttttgaagctacagaagcaacatttaacttcttgttagatttggcaggattgttcagaatctttctccgcaatgcctatgtgtacacttcacaagggtttgtggtggtcaatggcaaagtttctacacttgtcaaacaagtgttagacttgcttaataagggtatgcaacttttgcatacaaaggtctcctgggctggttctaaaatcattgctgttatctacagcggcagggagtctctaatattcccatcgggaacctattactgtgtcaccactaaggctaagtccgttcaacaagatcttgacgttattttgcctggtgagttttccaagaagcagttaggactgctccaacctactgacaattctacaactgttagtgttactgtatccagtaacatggttgaaactgttgtgggtcaacttgagcaaactaatatgcatagtcctgatgttatagtaggtgactatgtcattattagtgaaaaattgtttgtgcgtagtaaggaagaagacggatttgccttctaccctgcttgcactaatggtcatgctgtaccgactctctttagacttaagggaggtgcacctgtaaaaaaagtagcctttggcggtgatcaagtacatgaggttgctgctgtaagaagtgttactgtcgagtacaacattcatgctgtattagacacactacttgcttcttctagtcttagaacctttgttgtagataagtctttgtcaattgaggagtttgctgacgtagtaaaggaacaagtctcagacttgcttgttaaattactgcgtggaatgccgattccagattttgatttagacgattttattgacgcaccatgctattgctttaacgctgagggtgatgcatcctggtcttctactatgatcttctctcttcaccccgtcgagtgtgacgaggagtgttctgaagtagaggcttcagatttagaagaaggtgaatcagagtgcatttctgagacttcaactgaacaagttgacgtttctcatgagacttctgacgacgagtgggctgctgcagttgatgaagcgttccctctcgatgaagcagaagatgttactgaatctgtgcaagaagaagcacaaccagtagaagtacctgttgaagatattgcgcaggttgtcatagctgacaccttacaggaaactcctgttgtgcctgatactgttgaagtcccaccgcaagtggtgaaacttccgtctgcacctcagactatccagcccgaggtaaaagaagttgcacctgtctatgaggctgataccgaacagacacagaatgttactgttaaacctaagaggttacgcaaaaagcgtaatgttgaccctttgtccaattttgaacataaggttattacagagtgcgttaccatagttttaggtgacgcaattcaagtagccaagtgctatggggagtctgtgttagttaatgctgctaacacacatcttaagcatggcggtggtatcgctggtgctattaatgcggcttcaaaaggggctgtccaaaaagagtcagatgagtatattctggctaaagggccgttacaagtaggagattcagttctcttgcaaggccattctctagctaagaatatcctgcatgtcgtaggcccagatgcccgcgctaaacaggatgtttctctccttagtaagtgctataaggctatgaatgcatatcctcttgtagtcactcctcttgtttcagcaggcatatttggtgtaaaaccagctgtgtcttttgattatcttattagggaggctaagactagagttttagtcgtcgttaattcccaagatgtctataagagtcttaccatagttgacattccacagagtttgactttttcatatgatgggttacgtggcgcaatacgtaaagctaaagattatggttttactgtttttgtgtgcacagacaactctgctaacactaaagttcttaggaacaagggtgttgattatactaagaagtttcttacagttgacggtgtgcaatattattgctacacgtctaaggacactttagatgatatcttacaacaggctaataagtctgttggtattatatctatgcctttgggatatgtgtctcatggtttagacttaatgcaagcagggagtgtcgtgcgtagagttaacgtgccctacgtgtgtctcctagctaataaagagcaagaagctattttgatgtctgaagacgttaagttaaacccttcagaagattttataaagcacgtccgcactaatggtggttacaattcttggcatttagtcgagggtgaactattggtgcaagacttacgcttaaataagctcctgcattggtctgatcaaaccatatgctacaaggatagtgtgttttatgttgtaaagaatagtacagcttttccatttgaaacactttcagcatgtcgtgcgtatttggattcacgcacgacacagcagttaacaatcgaagtcttagtgactgtcgatggtgtaaattttagaacagtcgttctaaataataagaacacttatagatcacagcttggatgcgttttctttaatggtgctgatatttctgacaccattcctgatgagaaacagaatggtcacagtttatatctagcagacaatttgactgctgatgaaacaaaggcgcttaaagagttatatggccccgttgatcctactttcttacacagattctattcacttaaggctgcagtccatgggtggaagatggttgtgtgtgataaggtacgttctctcaaattgagtgataataattgttatcttaatgcagttattatgacacttgatttattgaaggacattaaatttgttatacctgctctacagcatgcatttatgaaacataagggcggtgattcaactgacttcatagccctcattatggcttatggcaattgcacatttggtgctccagatgatgcctctcggttacttcataccgtgcttgcaaaggctgagttatgctgttctgcacgcatggtttggagagagtggtgcaatgtctgtggcataaaagatgttgttctacaaggcttaaaagcttgttgttacgtgggtgtgcaaactgttgaagatctgcgtgctcgcatgacatatgtatgccagtgtggtggtgaacgtcatcggcaattagtcgaacacaccaccccctggttgctgctctcaggcacaccaaatgaaaaattggtgacaacctccacggcgcctgattttgtagcatttaatgtctttcagggcattgaaacggctgttggccattatgttcatgctcgcctgaagggtggtcttattttaaagtttgactctggcaccgttagcaagacttcagactggaagtgcaaggtgacagatgtacttttccccggccaaaaatacagtagcgattgtaatgtcgtacggtattctttggacggtaatttcagaacagaggttgatcccgacctatctgctttctatgttaaggatggtaaatactttacaagtgaaccacccgtaacatattcaccagctacaattttagctggtagtgtctacactaatagctgccttgtatcgtctgatggacaacctggcggtgatgctattagtttgagttttaataaccttttagggtttgattctagtaaaccagtcactaagaaatacacttactccttcttgcctaaagaagacggcgatgtgttgttggctgagtttgacacttatgaccctatttataagaatggtgccatgtataaaggcaaaccaattctttgggtcaataaagcatcttatgatactaatcttaataagttcaatagagctagtttgcgtcaaatttttgacgtagcccccattgaactcgaaaataaattcacacctttgagtgtggagtctacaccagttgaacctccaactgtagatgtggtagcacttcaacaggaaatgacaattgtcaaatgtaagggtttaaataaacctttcgtgaaggacaatgtcagtttcgttgctgatgattcaggtactcccgttgttgagtatctgtctaaagaagacctacatacattgtatgtagaccctaagtatcaagtcattgtcttaaaagacaatgtactttcttctatgcttagattgcacaccgttgagtcaggtgatattaacgttgttgcagcttccggatctttgacacgtaaagtgaagttactatttagggcttcattttatttcaaagaatttgctacccgcactttcactgctaccactgctgtaggtagttgtataaagagtgtagtgcggcatctaggtgttactaaaggcatattgacaggctgttttagttttgccaagatgttatttatgcttccactagcttactttagtgattcaaaactcggcaccacagaggttaaagtgagtgctttgaaaacagccggcgttgtgacaggtaatgttgtaaaacagtgttgcactgctgctgttgatttaagtatggataagttgcgccgtgtggattggaaatcaaccctacggttgttacttatgttatgcacaactatggtattgttgtcttctgtgtatcacttgtatgtcttcaatcaggtcttatcaagtgatgttatgtttgaagatgcccaaggtttgaaaaagttctacaaagaagttagagcttacctaggaatctcttctgcttgtgacggtcttgcttcagcttatagggcgaattcctttgatgtacctacattctgcgcaaaccgttctgcaatgtgtaattggtgcttgattagccaagattccataactcactacccagctcttaagatggttcaaacacatcttagccactatgttcttaacatagattggttgtggtttgcatttgagactggtttggcatacatgctctatacctcggccttcaactggttgttgttggcaggtacattgcattatttctttgcacagacttccatatttgtagactggcggtcatacaattatgctgtgtctagtgccttctggttattcacccacattccaatggcgggtttggtacgaatgtataatttgttagcatgcctttggcttttacgcaagttttatcagcatgtaatcaatggttgcaaagatacggcatgcttgctctgctataagaggaaccgacttactagagttgaagcttctaccgttgtctgtggtggaaaacgtacgttttatatcacagcaaatggcggtatttcattctgtcgtaggcataattggaattgtgtggattgtgacactgcaggtgtggggaataccttcatctgtgaagaagtcgcaaatgacctcactaccgccctacgcaggcctattaacgctacggatagatcacattattatgtggattccgttacagttaaagagactgttgttcagtttaattatcgtagagacggtcaaccattctacgagcggtttcccctctgcgcttttacaaatctagataagttgaagttcaaagaggtctgtaaaactactactggtatacctgaatacaactttatcatctacgactcatcagatcgtggccaggaaagtttagctaggtctgcatgtgtttattattctcaagtcttgtgtaaatcaattcttttggttgactcaagtttggttacttctgttggtgattctagtgaaatcgccactaaaatgtttgattcctttgttaatagtttcgtctcgctgtataatgtcacacgcgataagttggaaaaacttatctctactgctcgtgatggcgtaaggcgaggcgataacttccatagtgtcttaacaacattcattgacgcagcacgaggccccgcaggtgtggagtctgatgttgagaccaatgaaattgttgactctgtgcagtatgctcataaacatgacatacaaattactaatgagagctacaataattatgtaccctcatatgttaaacctgatagtgtgtctaccagcgatttaggtagtctcattgattgtaatgcggcttcagttaaccaaattgtcttgcgtaattctaatggtgcttgcatttggaacgctgctgcatatatgaaactctcggatgcacttaaacgacagattcgcattgcatgccgtaagtgtaatttagctttccggttaaccacctcaaagctacgcgctaatgataatatcttatcagttagattcactgctaacaaaattgttggtggtgctcctacatggtttaatgcgttgcgtgactttacgttaaagggttatgttcttgctaccattattgtgtttctgtgtgctgtactgatgtatttgtgtttacctacattttctatggcacctgttgaattttatgaagaccgcatcttggactttaaagttcttgataatggtatcattagggatgtaaatcctgatgataagtgctttgctaataagcaccggtccttcacacaatggtatcatgagcatgttggtggtgtctatgacaactctatcacatgcccattgacagttgcagtaattgctggagttgctggtgctcgcattccagacgtacctactacattggcttgggtgaacaatcagataattttctttgtttctcgagtctttgctaatacaggcagtgtttgctacactcctatagatgagataccctataagagtttctctgatagtggttgcattcttccatctgagtgcactatgtttagggatgcagagggccgtatgacaccatactgccatgatcctactgttttgcctggggcttttgcgtacagtcagatgaggcctcatgttcgttacgacttgtatgatggtaacatgtttattaaatttcctgaagtagtatttgaaagtacacttaggattactagaactctgtcaactcagtactgccggttcggtagttgtgagtatgcacaagagggtgtttgtattaccacaaatggctcgtgggccatttttaatgaccaccatcttaatagacctggtgtctattgtggctctgattttattgacattgtcaggcggttagcagtatcactgttccagcctattacttatttccaattgactacctcattggtcttgggtataggtttgtgtgcgttcctgactttgctcttctattatattaataaagtaaaacgtgcttttgcagattacacccagtgtgctgtaattgctgttgttgctgctgttcttaatagcttgtgcatctgctttgttacctctataccattgtgtatagtaccttacactgcattgtactattatgctacattctattttactaatgagcctgcatttattatgcatgtttcttggtacattatgttcgggcctatcgttcccatatggatgacctgcgtctatacagttgcaatgtgctttagacacttcttctgggttttagcttattttagtaagaaacatgtagaagtttttactgatggtaagcttaattgtagtttccaggacgctgcctctaatatctttgttattaacaaggacacttatgcagctcttagaaactctttaactaatgatgcctattcacgatttttggggttgtttaacaagtataagtacttctctggtgctatggaaacagccgcttatcgtgaagctgcagcatgtcatcttgctaaagccttacaaacatacagcgagactggtagtgatcttctttaccaaccacccaactgtagcataacctctggcgtgttgcaaagcggtttggtgaaaatgtcacatcccagtggagatgttgaggcttgtatggttcaggttacctgcggtagcatgactcttaatggtctttggcttgacaacacagtctggtgcccacgacacgtaatgtgcccggctgaccagttgtctgatcctaattatgatgccttgttgatttctatgactaatcatagtttcagtgtgcaaaaacacattggcgctccagcaaacttgcgtgttgttggtcatgccatgcaaggcactcttttgaagttgactgtcgatgttgctaaccctagcactccagcctacacttttacaacagtgaaacctggcgcagcatttagtgtgttagcatgctataatggtcgtccgactggtacattcactgttgtaatgcgccctaactacacaattaagggttcctttctgtgtggttcttgtggtagtgttggttacaccaaggagggtagtgtgatcaatttctgttacatgcatcaaatggaacttgctaatggtacacataccggttcagcatttgatggtactatgtatggtgcctttatggataaacaagtgcaccaagttcagttaacagacaaatactgcagtgttaatgtagtagcttggctttacgcagcaatacttaatggttgcgcttggtttgtaaaacctaatcgcactagtgttgtttcttttaatgaatgggctcttgccaaccaattcactgaatttgttggcactcaatccgttgacatgttagctgtcaaaacaggcgttgctattgaacagctgctttatgcgatccaacaactgtatactgggttccagggaaagcaaatccttggcagtaccatgttggaagatgaattcacacctgaggatgttaatatgcagattatgggtgtggttatgcagagtggtgtgagaaaagttacatatggtactgcgcattggttgtttgcgacccttgtctcaacctatgtgataatcttacaagccactaaatttactttgtggaactacttgtttgagactattcccacacagttgttcccactcttatttgtgactatggccttcgttatgttgttggttaaacacaaacacacctttttgacacttttcttgttgcctgtggctatttgtttgacttatgcaaacatagtctacgagcccactactcccatttcgtcagcgctgattgcagttgcaaattggcttgcccccactaatgcttatatgcgcactacacatactgatattggtgtctacattagtatgtcacttgtattagtcattgtagtgaagagattgtacaacccatcactttctaactttgcgttagcattgtgcagtggtgtaatgtggttgtacacttatagcattggagaagcctcaagccccattgcctatctggtttttgtcactacactcactagtgattatacgattacagtctttgttactgtcaaccttgcaaaagtttgcacttatgccatctttgcttactcaccacagcttacacttgtgtttccggaagtgaagatgatacttttattatacacatgtttaggtttcatgtgtacttgctattttggtgtcttctctcttttgaaccttaagcttagagcacctatgggtgtctatgactttaaggtctcaacacaagagttcagattcatgactgctaacaatctaactgcacctagaaattcttgggaggctatggctctgaactttaagttaataggtattggcggtacaccttgtataaaggttgctgctatgcagtctaaacttacagatcttaaatgcacatctgtggttctcctctctgtgctccaacagttacacttagaggctaatagtagggcctgggctttctgtgttaaatgccataatgatatattggcagcaacagaccccagtgaggctttcgagaaattcgtaagtctctttgctactttaatgactttttctggtaatgtagatcttgatgcgttagctagtgatatttttgacactcctagcgtacttcaagctactctttctgagttttcacacttagctacctttgctgagttggaagctgcgcagaaagcctatcaggaagctatggactctggtgacacctcaccacaagttcttaaggctttgcagaaggctgttaatatagctaaaaacgcctatgagaaggataaggcagtggcccgtaagttagaacgtatggctgatcaggctatgacttctatgtataagcaagcacgtgctgaagacaagaaagcaaaaattgtcagtgctatgcaaactatgttgtttggtatgattaagaagctcgacaacgatgttcttaatggtatcatttctaacgctaggaatggttgtatacctcttagtgtcatcccactgtgtgcttcaaataaacttcgcgttgtaattcctgacttcaccgtctggaatcaggtagtcacatatccctcgcttaactacgctggggctttgtgggacattacagttataaacaatgtggacaatgaaattgttaagtcttcagatgttgtagacagcaatgaaaatttaacatggccacttgttttagaatgcactagggcatccacttctgccgttaagttgcaaaataatgagatcaaaccttcaggtctaaaaaccatggttgtgtctgcgggtcaagagcaaactaactgtaatactagttccttagcttattacgaacctgtgcagggtcgtaaaatgctgatggctcttctttctgataatgcctatctcaaatgggcgcgtgttgaaggtaaggacggatttgtcagtgtagagctacaacctccttgcaaattcttgattgcgggaccaaaaggacctgaaatccgatatctctattttgttaaaaatcttaacaaccttcatcgcgggcaagtgttagggcacattgctgcgactgttagattgcaagctggttctaacaccgagtttgcctctaattcctcggtgttgtcacttgttaacttcaccgttgatcctcaaaaagcttatctcgatttcgtcaatgcgggaggtgccccattgacaaattgtgttaagatgcttactcctaaaactggtacaggtatagctatatctgttaaaccagagagtacagctgatcaagagacttatggtggagcttcagtgtgtctctattgccgtgcgcatatagaacatcctgatgtctctggtgtttgtaaatataagggtaagtttgtccaaatccctgctcagtgtgtccgtgaccctgtgggattttgtttgtcaaataccccctgtaatgtctgtcaatattggattggatatgggtgcaattgtgactcgcttaggcaagcagcactgccccaatctaaagattccaattttttaaacgagtccggggttctattgtaaatgcccgaatagaaccctgttcaagtggtttgtccactgatgtcgtctttagggcatttgacatctgcaactataaggctaaggttgctggtattggaaaatactacaagactaatacttgtaggtttgtagaattagatgaccaagggcatcatttagactcctattttgtcgttaagaggcatactatggagaattatgaactagagaagcactgttacgacttgttacgtgactgtgatgctgtagctccccatgatttcttcatctttgatgtagacaaagttaaaacacctcatattgtacgtcagcgtttaactgagtacactatgatggatcttgtatatgccctgaggcactttgatcaaaatagcgaagtgcttaaggctatcttagtgaagtatggttgctgtgatgttacctactttgaaaataaactctggtttgattttgttgaaaatcccagtgttattggtgtttatcataaacttggagaacgtgtacgccaagctatcttaaacactgttaaattttgtgaccacatggtcaaggctggtttagtcggtgtgctcacactagacaaccaggaccttaatggcaagtggtatgattttggtgacttcgtaatcactcaacctggttcaggagtagctatagttgatagctactattcttatttgatgcctgtgctctcaatgaccgattgtctggccgctgagacacatagggattgtgattttaataaaccactcattgagtggccacttactgagtatgattttactgattataaggtacaactctttgagaagtactttaaatattgggatcagacgtatcacgcaaattgcgttaattgtactgatgaccgttgtgtgttacattgtgctaatttcaatgtattgtttgctatgaccatgcctaagacttgtttcggacccatagtccgaaagatctttgttgatggcgtgccatttgtagtatcttgtggttatcactacaaagaattaggtttagtcatgaatatggatgttagtctccatagacataggctctctcttaaggagttgatgatgtatgccgctgatccagccatgcacattgcctcctctaacgcttttcttgatttgaggacatcatgttttagtgtcgctgcacttacaactggtttgacttttcaaactgtgcggcctggcaattttaaccaagacttctatgatttcgtggtatctaaaggtttctttaaggagggctcttcagtgacgctcaaacattttttctttgctcaagatggtaatgctgctattacagattataattactattcttataatctgcctactatgtgtgacatcaaacaaatgttgttctgcatggaagttgtaaacaagtacttcgaaatctatgacggtggttgtcttaatgcttctgaagtggttgttaataatttagacaagagtgctggccatccttttaataagtttggcaaagctcgtgtctattatgagagcatgtcttaccaggagcaagatgaactttttgccatgacaaagcgtaacgtcattcctaccatgactcaaatgaatctaaaatatgctattagtgctaagaatagagctcgcactgttgcaggcgtgtccatacttagcacaatgactaatcgccagtaccatcagaaaatgcttaagtccatggctgcaactcgtggagcgacttgcgtcattggtactacaaagttctacggtggctgggatttcatgcttaaaacattgtacaaagatgttgataatccgcatcttatgggttgggattaccctaagtgtgatagagctatgcctaatatgtgtagaatcttcgcttcactcatattagctcgtaaacatggcacttgttgtactacaagggacagattttatcgcttggcaaatgagtgtgctcaggtgctaagcgaatatgttctatgtggtggtggttactacgtcaaacctggaggtaccagtagcggagatgccaccactgcatatgccaatagtgtctttaacattttgcaggcgacaactgctaatgtcagtgcacttatgggtgctaatggcaacaagattgttgacaaagaagttaaagacatgcagtttgatttgtatgtcaatgtttacaggagcactagcccagaccccaaatttgttgataaatactatgcttttcttaataagcacttttctatgatgatactgtctgatgacggtgtcgtttgctataatagtgattatgcagctaagggttacattgctggaatacagaattttaaggaaacgctgtattatcagaacaatgtctttatgtctgaagctaaatgctgggtggaaaccgatctgaagaaagggccacatgaattctgttcacagcatacgctttatattaaggatggcgacgatggttacttccttccttatccagacccttcaagaattttgtctgccggttgctttgtagatgatatcgttaagactgacggtacactcatggtagagcggtttgtgtctttggctatagatgcttaccctctcacaaagcatgaagatatagaataccagaatgtattctgggtctacttacagtatatagaaaaactgtataaagaccttacaggacacatgcttgacagttattctgtcatgctatgtggtgataattctgctaagttttgggaagaggcattctatagagatctctatagttcgcctaccactttgcaggctgtcggttcatgcgttgtatgccattcacagacttccctacgctgtgggacatgcatccgtagaccatttctctgctgtaaatgctgctatgatcatgttatagcaactccacataagatggttttgtctgtttctccttacgtttgtaatgcccctggttgtggcgtttcagacgttactaagctatatttaggtggtatgagctacttttgtgtagatcatagacctgtgtgtagttttccactttgcgctaatggtcttgtattcggcttatacaagaatatgtgcacaggtagtccttctatagttgaatttaataggttggctacctgtgactggactgaaagtggtgattacacccttgccaatactacaacagaaccactcaaactttttgctgctgagactttacgtgccactgaagaggcgtctaagcagtcttatgctattgccaccatcaaagaaattgttggtgagcgccaactattacttgtgtgggaggctggcaagtccaaaccaccactcaatcgtaattatgtttttactggttatcatataaccaaaaatagtaaagtgcagctcggtgagtacattttcgagcgcattgattatagtgatgctgtatcctacaagtctagtacaacgtataaactgactgtaggtgacatcttcgtacttacctctcactctgtggctaccttgacggcgcccacaattgtgaatcaagagaggtatgttaaaattactgggttgtacccaaccattacggtacctgaagagttcgcaagtcatgttgccaacttccaaaaatcaggttatagtaaatatgtcactgttcagggaccacctggcactggcaaaagtcattttgctatagggttagcgatttactaccctacagcacgtgttgtttatacagcatgttcacacgcagctgttgatgctttgtgtgaaaaagcttttaaatatttgaacattgctaaatgttcccgtatcattcctgcaaaggcacgtgttgagtgctatgacaggtttaaagttaatgagacaaattctcaatatttgtttagtactattaatgctctaccagaaacttctgccgatattctggtggttgatgaggttagtatgtgcactaattatgatctttcaattattaatgcacgtattaaagctaagcacattgtctatgtaggagatccagcacagttgccagctcctaggactttgttgactagaggcacattggaaccagaaaatttcaatagtgtcactagattgatgtgtaacttaggtcctgacatatttttaagtatgtgctacaggtgtcctaaggaaatagtaagcactgtgagcgctcttgtctacaataataaattgttagccaagaaggagctttcaggccagtgctttaaaatactctataagggcaatgtgacgcatgatgctagctctgccattaatagaccacaactcacatttgtgaagaattttattactgccaatccggcatggagtaaggcagtctttatttcgccttacaattcacagaatgctgtgtctcgttcaatgctgggtcttaccactcagactgttgattcctcacagggttcagaataccagtacgttatcttctgtcaaacagcagatacggcacatgctaacaacattaacagatttaatgttgcaatcactcgtgcccaaaaaggtattctttgtgttatgacatctcaggcactctttgagtccttagagtttactgaattgtcttttactaattacaagctccagtctcagattgtaactggcctttttaaagattgctctagagaaacttctggcctctcacctgcttatgcaccaacatatgttagtgttgatgacaagtataagacgagtgatgagctttgcgtgaatcttaatttacccgcaaatgtcccatactctcgtgttatttccaggatgggctttaaactcgatgcaacagttcctggatatcctaagcttttcattactcgtgaagaggctgtaaggcaagttcgaagctggataggcttcgatgttgagggtgctcatgcttcccgtaatgcatgtggcaccaatgtgcctctacaattaggattttcaactggtgtgaactttgttgttcagccagttggtgttgtagacactgagtggggtaacatgttaacgggcattgctgcacgtcctccaccaggtgaacagtttaagcacctcgtgcctcttatgcataagggggctgcgtggcctattgttagacgacgtatagtgcaaatgttgtcagacactttagacaaattgtctgattactgtacgtttgtttgttgggctcatggctttgaattaacgtctgcatcatacttttgcaagataggtaaggaacagaagtgttgcatgtgcaatagacgcgctgcagcgtactcttcacctctgcaatcttatgcctgctggactcattcctgcggttatgattatgtctacaaccctttctttgtcgatgttcaacagtggggttatgtaggcaatcttgctactaatcacgatcgttattgctctgtccatcaaggagctcatgtggcttctaatgatgcaataatgactcgttgtttagctattcattcttgttttatagaacgtgtggattgggatatagagtatccttatatctcacatgaaaagaaattgaattcctgttgtagaatcgttgagcgcaacgtcgtacgtgctgctcttcttgccggttcatttgacaaagtctatgatattggcaatcctaaaggaattcctattgttgatgaccctgtggttgattggcattattttgatgcacagcccttgaccaggaaggtacaacagcttttctatacagaggacatggcctcaagatttgctgatgggctctgcttattttggaactgtaatgtaccaaaatatcctaataatgcaattgtatgcaggtttgacacacgtgtgcattctgagttcaatttgccaggttgtgatggcggtagtttgtatgttaacaagcacgcttttcatacaccagcatatgatgtgagtgcattccgtgatctgaaacctttaccattcttttattattctactacaccatgtgaagtgcatggtaatggtagtatgatagaggatattgattatgtacccctaaaatctgcagtctgtattacagcttgtaatttagggggcgctgtttgtaggaagcatgctacagagtacagagagtatatggaagcatataatcttgtctctgcatcaggtttccgcctttggtgttataagacctttgatatttataatctctggtctacttttacaaaagttcaaggtttggaaaacattgcttttaatgttgttaaacaaggccattttattggtgttgagggtgaactacctgtagctgtagtcaatgataagatcttcaccaagagtggcgttaatgacatttgtatgtttgagaataaaaccactttgcctactaatatagcttttgaactctatgctaagcgtgctgtacgctcgcatcccgatttcaaattgctacacaatttacaagcagacatttgctacaagttcgtcctttgggattatgaacgtagcaatatttatggtactgctactattggtgtatgtaagtacactgatattgatgttaattcagctttgaatatatgttttgacatacgcgataattgttcattggagaagttcatgtctactcccaatgccatctttatttctgatagaaaaatcaagaaatacccttgtatggtaggtcctgattatgcttacttcaatggtgctatcatccgtgatagtgatgttgttaaacaaccagtgaagttctacttgtataagaaagtcaataatgagtttattgatcctactgagtgtatttacactcagagtcgctcttgtagtgacttcctacccctttctgacatggagaaagactttctatcttttgatagtgatgttttcattaagaagtatggcttggaaaactatgcttttgagcacgtagtctatggagacttctctcatactacgttaggcggtcttcacttgcttattggtttatacaagaagcaacaggaaggtcatattattatggaagaaatgctaaaaggtagctcaactattcataactattttattactgagactaacacagcggcttttaaggcggtgtgttctgttatagatttaaagcttgacgactttgttatgattttaaagagtcaagaccttggcgtagtatccaaggttgtcaaggttcctattgacttaacaatgattgagtttatgttatggtgtaaggatggacaggttcaaaccttctaccctcgactccaggcttctgcagattggaaacctggtcatgcaatgccatccctctttaaagttcaaaatgtaaaccttgaacgttgtgagcttgctaattacaagcaatctattcctatgcctcgcggtgtgcacatgaacatcgctaaatatatgcaattgtgccagtatttaaatacttgcacattagccgtgcctgccaatatgcgtgttatacattttggcgctggttctgataaaggtatcgctcctggtacctcagttttacgacagtggcttcctacagatgccattattatagataatgatttaaatgagttcgtgtcagatgctgacataactttatttggagattgtgtaactgtacgtgtcggccaacaagtggatcttgttatttccgacatgtatgatcctactactaagaatgtaacaggtagtaatgagtcaaaggctttattctttacttacctgtgtaacctcattaataataatcttgctcttggtgggtctgttgctattaaaataacagaacactcttggagcgttgaactttatgaacttatgggaaaatttgcttggtggactgttttctgcaccaatgcaaatgcatcctcatctgaaggattcctcttaggtattaattacttgggtactattaaagaaaatatagatggtggtgctatgcacgccaactatatattttggagaaattccactcctatgaatctgagtacttactcactttttgatttatccaagtttcaattaaaattaaaaggaacaccagttcttcaattaaaggagagtcaaattaacgaactcgtaatatctctcctgtcgcagggtaagttacttatccgtgacaatgatacactcagtgtttctactgatgttcttgttaacacctacagaaagttacgttgagggctccggcgagggcaggggaagtcttctaacatgcggggacgtggaggaaaatcccggcccaatgggggaagatgccaaaaacattaagaagggcccagcgccattctacccactcgaagacgggaccgccggcgagcagctgcacaaagccatgaagcgctacgccctggtgcccggcaccatcgcctttaccgacgcacatatcgaggtggacattacctacgccgagtacttcgagatgagcgttcggctggcagaagctatgaagcgctatgggctgaatacaaaccatcggatcgtggtgtgcagcgagaatagcttgcagttcttcatgcccgtgttgggtgccctgttcatcggtgtggctgtggccccagctaacgacatctacaacgagcgcgagctgctgaacagcatgggcatcagccagcccaccgtcgtattcgtgagcaagaaagggctgcaaaagatcctcaacgtgcaaaagaagctaccgatcatacaaaagatcatcatcatggatagcaagaccgactaccagggcttccaaagcatgtacaccttcgtgacttcccatttgccacccggcttcaacgagtacgacttcgtgcccgagagcttcgaccgggacaaaaccatcgccctgatcatgaacagtagtggcagtaccggattgcccaagggcgtagccctaccgcaccgcaccgcttgtgtccgattcagtcatgcccgcgaccccatcttcggcaaccagatcatccccgacaccgctatcctcagcgtggtgccatttcaccacggcttcggcatgttcaccacgctgggctacttgatctgcggctttcgggtcgtgctcatgtaccgcttcgaggaggagctattcttgcgcagcttgcaagactataagattcaatctgccctgctggtgcccacactatttagcttcttcgctaagagcactctcatcgacaagtacgacctaagcaacttgcacgagatcgccagcggcggggcgccgctcagcaaggaggtaggtgaggccgtggccaaacgcttccacctaccaggcatccgccagggctacggcctgacagaaacaaccagcgccattctgatcacccccgaaggggacgacaagcctggcgcagtaggcaaggtggtgcccttcttcgaggctaaggtggtggacttggacaccggtaagacactgggtgtgaaccagcgcggcgagctgtgcgtccgtggccccatgatcatgagcggctacgttaacaaccccgaggctacaaacgctctcatcgacaaggacggctggctgcacagcggcgacatcgcctactgggacgaggacgagcacttcttcatcgtggaccggctgaagagcctgatcaaatacaagggctaccaggtagccccagccgaactggagagcatcctgctgcaacaccccaacatcttcgacgccggggtcgccggcctgcccgacgacgatgccggcgagctgcccgccgcagtcgtcgtgctggaacacggtaaaaccatgaccgagaaggagatcgtggactatgtggccagccaggttacaaccgccaagaagctgcgcggtggtgttgtgttcgtggacgaggtgcctaaaggactgaccggcaagttggacgcccgcaagatccgcgagattctcattaaggccaagaagggcggcaagatcgccgtgcagtcgacggtaccgcgggcccgggatccaccggtcgccaccatggtgagcaagggcgaggagctgttcaccggggtggtgcccatcctggtcgagctggacggcgacgtaaacggccacaagttcagcgtgtccggcgagggcgagggcgatgccacctacggcaagctgaccctgaagttcatctgcaccaccggcaagctgcccgtgccctggcccaccctcgtgaccaccctgacctacggcgtgcagtgcttcagccgctaccccgaccacatgaagcagcacgacttcttcaagtccgccatgcccgaaggctacgtccaggagcgcaccatcttcttcaaggacgacggcaactacaagacccgcgccgaggtgaagttcgagggcgacaccctggtgaaccgcatcgagctgaagggcatcgacttcaaggaggacggcaacatcctggggcacaagctggagtacaactacaacagccacaacgtctatatcatggccgacaagcagaagaacggcatcaaggtgaacttcaagatccgccacaacatcgaggacggcagcgtgcagctcgccgaccactaccagcagaacacccccatcggcgacggccccgtgctgctgcccgacaaccactacctgagcacccagtccgccctgagcaaagaccccaacgagaagcgcgatcacatggtcctgctggagttcgtgaccgccgccgggatcactctcggcatggacgagctgtacaagtaattaacgaactattaatgagagttcaaagaccacccactctcttgttagtgttttcactctctcttttggtcactgcatcctcaaaacctctctatgtacctgagcattgtcagaattattctggttgcatgcttagggcttgtattaaaactgcccaagctgatacagctggtctttatacaaattttcgaattgacgtcccatctgcagaatcaactggtactcaatcagtttctgtcgatcttgagtcaacttcaactcatgatggtcctaccgaacatgttactagtgtgaatctttttgacgttggttactcagttaattaacgaactctatggattacgtgtctctgcttaatcaaatttggcagaagtaccttaactcaccgtatactacttgtttgtacatccctaaacccacagctaagtatacacctttagttggcacttcattgcaccctgtgctgtggaactgtcagctatcctttgctggttatactgaatctgctgttaattctacaaaagctttggccaaacaggacgcagctcagcgaatcgcttggttgctacataaggatggaggaatccctgatggatgttccctctacctccggcactcaagtttattcgcgcaaagcgaggaagaggagccattctccaactaagaaactgcgctacgttaagcgtagattttctcttctgcgccatgaagaccttagtgttattgtccaaccaacacactatgtcagggttacattttcagaccccaacatgtggtatctacgttcgggtcatcatttacactcagttcacaattggcttaaaccttatggcggccaacctgtttctgagtaccatattactctagctttgctaaatctcactgatgaagatttagctagagatttttcacccattgcgctctttttgcgcaatgtcagatttgagctacatgagttcgccttgctgcgcaaaactcttgttcttaatgcatcagagatctactgtgctaacatacatagatttaagcctgtgtatagagttaacacggcaatccctactattaaggattggcttctcgttcagggattttccctttaccatagtggcctccctttacatatgtcaatctctaaattgcatgcactggatgatgttactcgcaattacatcattacaatgccatgctttagaacttaccctcaacaaatgtttgttactcctttggccgtagatgttgtctccatacggtcttccaatcagggtaataaacaaattgttcattcttatcccattttacatcatccaggattttaacgaactatggctttctcggcgtctttatttaaacccgtccagctagtcccagtttctcctgcatttcatcgcattgagtctactgactctattgttttcacatacattcctgctagcggctatgtagctgctttagctgtcaatgtgtgtctcattcccctattattactgctacgtcaagatacttgtcgtcgcagcattatcagaactatggttctctatttccttgttctgtataactttttattagccattgtactagtcaatggtgtacattatccaactggaagttgcctgatagccttcttagttatcctcataatactttggtttgtagatagaattcgtttctgtctcatgctgaattcctacattccactgtttgacatgcgttcccactttattcgtgttagtacagtttcttctcatggtatggtccctgtaatacacaccaaaccattatttattagaaacttcgatcagcgttgcagctgttctcgttgtttttatttgcactcttccacttatatagagtgcacttatattagccgttttagtaagattagcctagtttctgtaactgacttctccttaaacggcaatgtttccactgttttcgtgcctgcaacgcgcgattcagttcctcttcacataatcgccccgagctcgcttatcgtttaagcagctctgcgctactatgggtcccgtgtagaggctaatccattagtctctctttggacatatggaaaacgaactatgatcgagcaggatggcctgcatgccggatctccagctgcctgggttgagagactgttcggctatgattgggcccagcagaccatcggctgttctgatgccgccgtgtttagactgagtgcccagggtagacccgtgctgttcgtgaaaaccgatctgtctggcgccctgaacgagctgcaggatgaagccgctagactgagctggctggctacaacaggcgtgccatgtgctgccgtgctggatgtggttacagaggccggaagagactggctgctgctgggagaagttccaggccaggatctgctgagcagtcatctggcccctgccgagaaggtgtccattatggccgatgccatgcggcggctgcacacacttgatcctgccacctgtcctttcgaccaccaagccaagcaccggatcgagagggccagaaccagaatggaagccggcctggtggaccaggacgacctggatgaagaacaccaaggactggccccagctgagctgttcgccagactgaaagccagaatgcccgacggcgaggatctggtggttacacatggggatgcctgcctgcctaacatcatggtggaaaacggccggttcagcggctttatcgactgtggcagactgggcgtcgccgacagatatcaggatatcgccctggccaccagagatatcgccgaagaacttggcggagagtgggccgatagattcctggtgctgtacggaatcgccgctcctgactctcagcggatcgccttctacagactgctggacgagttcttctgagctctttagtaagagtatcttaattgattttaacgaatctcaatttcattgttatggcatcccctgctgcacctcgtgctgtttcctttgccgataacaatgatataacaaatacaaacctatctcgaggtagaggacgtaatccaaaaccacgagctgcaccaaataacactgtctcttggtacactgggcttacccaacacgggaaagtccctcttacctttccacctgggcagggtgtacctcttaatgccaattctacccctgcgcaaaatgctgggtattggcggagacaggacagaaaaattaataccgggaatggaattaagcaactggctcccaggtggtacttctactacactggaactggacccgaagcagcactcccattccgggctgttaaggatggcatcgtttgggtccatgaagatggcgccactgatgctccttcaacttttgggacgcggaaccctaacaatgattcagctattgttacacaattcgcgcccggtactaagcttcctaaaaacttccacattgaggggactggaggcaatagtcaatcatcttcaagagcctctagcttaagcagaaactcttccagatctagttcacaaggttcaagatcaggaaactctacccgcggcacttctccaggtccatctggaatcggagcagtaggaggtgatctactttaccttgatcttctgaacagactacaagcccttgagtctggcaaagtaaagcaatcgcagccaaaagtaatcactaagaaagatgctgctgctgctaaaaataagatgcgccacaagcgcacttccaccaaaagtttcaacatggtgcaagcttttggtcttcgcggaccaggagacctccagggaaactttggtgatcttcaattgaataaactcggcactgaggacccacgttggccccaaattgctgagcttgctcctacagccagtgcttttatgggtatgtcgcaatttaaacttacccatcagaacaatgatgatcatggcaaccctgtgtacttccttcggtacagtggagccattaaacttgacccaaagaatcccaactacaataagtggttggagcttcttgagcaaaatattgatgcctacaaaaccttccctaagaaggaaaagaaacaaaaggcaccaaaagaagaatcaacagaccaaatgtctgaacctccaaaggagcagcgtgtgcaaggtagcatcactcagcgcactcgcacccgtccaagtgttcagcctggtccaatgattgatgttaacactgattagtgtcactcaaagtaacaagatcgcggcaatcgtttgtgtttggcaaccccatctcaccatcgcttgtccactcttgcacagaatggaatcatgttgtaattacagtgcaataaggtaattataacccatttaattgatagctatgctttattaaagtgtgtagctgtagagagaatgttaaagactgtcacctctgcttgattgcaagtgaacagtgccccccgggaagagctctacagtgtgaaatgtaaataaaaaatagctattattcaattagattaggctaattagatgatttgcaaaaaaaaaaaaaaaaaaaaaaaaaagggtcggcatggcatctccacctcctcgcggtccgacctgggcatccgaaggaggacgcacgtccactcggatggctaagggagagcctgcagtagcataaccccttggggcctctaaacgggtcttgaggggttttttg

SEQ ID NO: 31 - RNA, 29736 nt, SARS coronavirus CUHK-W1
cuacccaggaaaagccaaccaaccucgaucucuuguagaucuguucucuaaacgaacuuuaaaaucuguguagcugucgcucggcugcaugccuagugcaccuacgcaguauaaacaauaauaaauuuuacugucguugacaagaaacgaguaacucgucccucuucugcagacugcuuacgguuucguccguguugcagucgaucaucagcauaccuagguuucguccgggugugaccgaaagguaagauggagagccuuguucuuggugucaacgagaaaacacacguccaacucaguuugccuguccuucagguuagagacgugcuagugcguggcuucggggacucuguggaagaggcccuaucggaggcacgugaacaccucaaaaauggcacuuguggucuaguagagcuggaaaaaggcguacugccccagcuugaacagcccuauguguucauuaaacguucugaugccuuaagcaccaaucacggccacaaggucguugagcugguugcagaaauggacggcauucaguacggucguagcgguauaacacugggaguacucgugccacaugugggcgaaaccccaauugcauaccgcaauguucuucuucguaagaacgguaauaagggagccgguggucauagcuauggcaucgaucuaaagucuuaugacuuaggugacgagcuuggcacugaucccauugaagauuaugaacaaaacuggaacacuaagcauggcaguggugcacuccgugaacucacucgugagcucaauggaggugcagucacucgcuaugucgacaacaauuucuguggcccagauggguacccucuugauugcaucaaagauuuucucgcacgcgcgggcaagucaaugugcacucuuuccgaacaacuugauuacaucgagucgaagagaggugucuacugcugccgugaccaugagcaugaaauugccugguucacugagcgcucugauaagagcuacgagcaccagacacccuucgaaauuaagagugccaagaaauuugacacuuucaaaggggaaugcccaaaguuuguguuuccucuuaacucaaaagucaaagucauucaaccacguguugaaaagaaaaagacugaggguuucauggggcguauacgcucuguguacccuguugcaucuccacaggaguguaacaauaugcacuugucuaccuugaugaaauguaaucauugcgaugaaguuucauggcagacgugcgacuuucugaaagccacuugugaacauuguggcacugaaaauuuaguuauugaaggaccuacuacauguggguaccuaccuacuaaugcuguagugaaaaugccauguccugccugucaagacccagagauuggaccugagcauaguguugcagauuaucacaaccacucaaacauugaaacucgacuccgcaagggagguaggacuagauguuuuggaggcuguguguuugccuauguuggcugcuauaauaagcgugccuacuggguuccucgugcuagugcugauauuggcucaggccauacuggcauuacuggugacaauguggagaccuugaaugaggaucuccuugagauacugagucgugaacguguuaacauuaacauuguuggcgauuuucauuugaaugaagagguugccaucauuuuggcaucuuucucugcuucuacaagugccuuuauugacacuauaaagagucuugauuacaagucuuucaaaaccauuguugaguccugcgguaacuauaaaguuaccaagggaaagcccguaaaaggugcuuggaacauuggacaacagagaucaguuuuaacaccacugugugguuuucccucacaggcugcugguguuaucagaucaauuuuugcgcgcacacuugaugcagcaaaccacucaauuccugauuugcaaagagcagcugucaccauacuugaugguauuucugaacagucauuacgucuugucgacgccaugguuuauacuucagaccugcucaccaacagugucauuauuauggcauauguaacugguggucuuguacaacagacuucucagugguugucuaaucuuuugggcacuacuguugaaaaacucaggccuaucuuugaauggauugaggcgaaacuuagugcaggaguugaauuucucaaggaugcuugggagauucucaaauuucucauuacagguguuuuugacaucgucaagggucaaauacagguugcuucagauaacaucaaggauuguguaaaaugcuucauugauguuguuaacaaggcacucgaaaugugcauugaucaagucacuaucgcuggcgcaaaguugcgaucacucaacuuaggugaagucuucaucgcucaaagcaagggacuuuaccgucaguguauacguggcaaggagcagcugcaacuacucaugccucuuaaggcaccaaaagaaguaaccuuucuugaaggugauucacaugacacaguacuuaccucugaggagguuguucucaagaacggugaacucgaagcacucgagacgcccguugauagcuucacaaauggagcuaucguuggcacaccagucuguguaaauggccucaugcucuuagagauuaaggacaaagaacaauacugcgcauugucuccugguuuacuggcuacaaacaaugucuuucgcuuaaaagggggugcaccaauuaaagguguaaccuuuggagaagauacuguuugggaaguucaagguuacaagaaugugagaaucacauuugagcuugaugaacguguugacaaagugcuuaaugaaaagugcucugucuacacuguugaauccgguaccgaaguuacugaguuugcauguguuguagcagaggcuguugugaagacuuuacaaccaguuucugaucuccuuaccaacauggguauugaucuugaugaguggaguguagcuacauucuacuuauuugaugaugcuggugaagaaaacuuuucaucacguauguauuguuccuuuuacccuccagaugaggaagaagaggacgaugcagagugugaggaagaagaaauugaugaaaccugugaacaugaguacgguacagaggaugauuaucaaggucucccucuggaauuuggugccucagcugaaacaguucgaguugaggaagaagaagaggaagacuggcuggaugauacuacugagcaaucagagauugagccagaaccagaaccuacaccugaagaaccaguuaaucaguuuacugguuauuuaaaacuuacugacaauguugccauuaaauguguugacaucguuaaggaggcacaaagugcuaauccuauggugauuguaaaugcugcuaacauacaccugaaacaugguggugguguagcaggugcacucaacaaggcaaccaauggugccaugcaaaaggagagugaugauuacauuaagcuaaauggcccucuuacaguaggagggucuuguuugcuuucuggacauaaucuugcuaagaagugucugcauguuguuggaccuaaccuaaaugcaggugaggacauccagcuucuuaaggcagcauaugaaaauuucaauucacaggacaucuuacuugcaccauuguugucagcaggcauauuuggugcuaaaccacuucagucuuuacaagugugcgugcagacgguucguacacagguuuauauugcagucaaugacaaagcucuuuaugagcagguugucauggauuaucuugauaaccugaagccuagaguggaagcaccuaaacaagaggagccaccaaacacagaagauuccaaaacugaggagaaaucugucguacagaagccugucgaugugaagccaaaaauuaaggccugcauugaugagguuaccacaacacuggaagaaacuaaguuucuuaccaauaaguuacucuuguuugcugauaucaaugguaagcuuuaccaugauucucagaacaugcuuagaggugaagauaugucuuuccuugagaaggaugcaccuuacaugguaggugauguuaucacuaguggugauaucacuuguguuguaauacccuccaaaaaggcugguggcacuacugagaugcucucaagagcuuugaagaaagugccaguugaugaguauauaaccacguacccuggacaaggaugugcugguuauacacuugaggaagcuaagacugcucuuaagaaaugcaaaucugcauuuuauguacuaccuucagaagcaccuaaugcuaaggaagagauucuaggaacuguauccuggaauuugagagaaaugcuugcucaugcugaagagacaagaaaauuaaugccuauaugcauggauguuagagccauaauggcaaccauccaacguaaguauaaaggaauuaaaauucaagagggcaucguugacuaugguguccgauucuucuuuuauacuaguaaagagccuguagcuucuauuauuacgaagcugaacucucuaaaugagccgcuugucacaaugccaauugguuaugugacacaugguuuuaaucuugaagaggcugcgcgcuguaugcguucucuuaaagcuccugccguagugucaguaucaucaccagaugcuguuacuacauauaauggauaccucacuucgucaucaaagacaucugaggagcacuuuguagaaacaguuucuuuggcuggcucuuacagagauugguccuauucaggacagcguacagaguuagguguugaauuucuuaagcguggugacaaaauuguguaccacacucuggagagccccgucgaguuucaucuugacggugagguucuuucacuugacaaacuaaagagucucuuaucccugcgggagguuaagacuauaaaaguguucacaacuguggacaacacuaaucuccacacacagcuuguggauaugucuaugacauauggacagcaguuugguccaacauacuuggauggugcugauguuacaaaaauuaaaccucauguaaaucaugaggguaagacuuucuuuguacuaccuagugaugacacacuacguagugaagcuuucgaguacuaccauacucuugaugagaguuuucuugguagguacaugucugcuuuaaaccacacaaagaaauggaaauuuccucaaguuggugguuuaacuucaauuaaaugggcugauaacaauuguuauuugucuaguguuuuauuagcacuucaacagcuugaagucaaauucaaugcaccagcacuucaagaggcuuauuauagagcccgugcuggugaugcugcuaacuuuugugcacucauacucgcuuacaguaauaaaacuguuggcgagcuuggugaugucagagaaacuaugacccaucuucuacagcaugcuaauuuggaaucugcaaagcgaguucuuaaugugguguguaaacauuguggucagaaaacuacuaccuuaacggguguagaagcugugauguauauggguacucuaucuuaugauaaucuuaagacagguguuuccauuccauguguguguggucgugaugcuacacaauaucuaguacaacaagagucuucuuuuguuaugaugucugcaccaccugcugaguauaaauuacagcaagguacauucuuaugugcgaaugaguacacugguaacuaucaguguggucauuacacucauauaacugcuaaggagacccucuaucguauugacggagcucaccuuacaaagaugucagaguacaaaggaccagugacugauguuuucuacaaggaaacaucuuacacuacaaccaucaagccugugucguauaaacucgauggaguuacuuacacagagauugaaccaaaauuggauggguauuauaaaaaggauaaugcuuacuauacagagcagccuauagaccuuguaccaacucaaccauuaccaaaugcgaguuuugauaauuucaaacucacauguucuaacacaaaauuugcugaugauuuaaaucaaaugacaggcuucacaaagccagcuucacgagagcuaucugucacauucuucccagacuugaauggcgauguaguggcuauugacuauagacacuauucagcgaguuucaagaaaggugcuaaauuacugcauaagccaauuguuuggcacauuaaccaggcuacaaccaagacaacguucaaaccaaacacuugguguuuacguugucuuuggaguacaaagccaguagauacuucaaauucauuugaaguucuggcaguagaagacacacaaggaauggacaaucuugcuugugaaagucaacaacccaccucugaagaaguaguggaaaauccuaccauacagaaggaagucauagagugugacgugaaaacuaccgaaguuguaggcaaugucauacuuaaaccaucagaugaagguguuaaaguaacacaagaguuaggucaugaggaucuuauggcugcuuauguggaaaacacaagcauuaccauuaagaaaccuaaugagcuuucacuagccuuagguuuaaaaacaauugccacucaugguauugcugcaauuaauaguguuccuuggaguaaaauuuuggcuuaugucaaaccauucuuaggacaagcagcaauuacaacaucaaauugcgcuaagagauuagcacaacguguguuuaacaauuauaugccuuauguguuuacauuauuguuccaauuguguacuuuuacuaaaaguaccaauucuagaauuagagcuucacuaccuacaacuauugcuaaaaauaguguuaagaguguugcuaaauuauguuuggaugccggcauuaauuaugugaagucacccaaauuuucuaaauuguucacaaucgcuauguggcuauuguuguuaaguauuugcuuagguucucuaaucuguguaacugcugcuuuugguguacucuuaucuaauuuuggugcuccuucuuauuguaauggcguuagagaauuguaucuuaauucgucuaacguuacuacuauggauuucugugaagguucuuuuccuugcagcauuuguuuaaguggauuagacucccuugauucuuauccagcucuugaaaccauucaggugacgauuucaucguacaagcuagacuugacaauuuuaggucuggccgcugaguggguuuuggcauauauguuguucacaaaauucuuuuauuuauuaggucuuucagcuauaaugcagguguucuuuggcuauuuugcuagucauuucaucagcaauucuuggcucaugugguuuaucauuaguauuguacaaauggcacccguuucugcaaugguuaggauguacaucuucuuugcuucuuucuacuacauauggaagagcuauguucauaucauggaugguugcaccucuucgacuugcaugaugugcuauaagcgcaaucgugccacacgcguugaguguacaacuauuguuaauggcaugaagagaucuuucuaugucuaugcaaauggaggccguggcuucugcaagacucacaauuggaauugucucaauugugacacauuuugcacugguaguacauucauuagugaugaaguugcucgugauuugucacuccaguuuaaaagaccaaucaacccuacugaccagucaucguauauuguugauaguguugcugugaaaaauggcgcgcuucaccucuacuuugacaaggcuggucaaaagaccuaugagagacauccucucucccauuuugucaauuuagacaauuugagagcuaacaacacuaaagguucacugccuauuaaugucauaguuuuugauggcaaguccaaaugcgacgagucugcuucuaagucugcuucuguguacuacagucagcugaugugccaaccuauucuguugcuugaccaagcucuuguaucagacguuggagauaguacugaaguuuccguuaagauguuugaugcuuaugucgacaccuuuucagcaacuuuuaguguuccuauggaaaaacuuaaggcacuuguugcuacagcucacagcgaguuagcaaaggguguagcuuuagaugguguccuuucuacauucgugucagcugcccgacaagguguuguugauaccgauguugacacaaaggauguuauugaaugucucaaacuuucacaucacucugacuuagaagugacaggugacaguuguaacaauuucaugcucaccuauaauaagguugaaaacaugacgcccagagaucuuggcgcauguauugacuguaaugcaaggcauaucaaugcccaaguagcaaaaagucacaauguuucacucaucuggaauguaaaagacuacaugucuuuaucugaacagcugcguaaacaaauucguagugcugccaagaagaacaacauaccuuuuagacuaacuugugcuacaacuagacagguugucaaugucauaacuacuaaaaucucacucaagggugguaagauuguuaguacuuguuuuaaacuuaugcuuaaggccacauuauugugcguucuugcugcauugguuuguuauaucguuaugccaguacauacauugucaauccaugaugguuacacaaaugaaaucauugguuacaaagccauucaggauggugucacucgugacaucauuucuacugaugauuguuuugcaaauaaacaugcugguuuugacgcaugguuuagccagcguggugguucauacaaaaaugacaaaagcugcccuguaguagcugcuaucauuacaagagagauugguuucauagugccuggcuuaccggguacugugcugagagcaaucaauggugacuucuugcauuuucuaccucguguuuuuagugcuguuggcaacauuugcuacacaccuuccaaacucauugaguauagugauuuugcuaccucugcuugcguucuugcugcugaguguacaauuuuuaaggaugcuaugggcaaaccugugccauauuguuaugacacuaauuugcuagaggguucuauuucuuauagugagcuucguccagacacucguuaugugcuuauggaugguuccaucauacaguuuccuaacacuuaccuggaggguucuguuagaguaguaacaacuuuugaugcugaguacuguagacaugguacaugcgaaaggucagaaguagguauuugccuaucuaccagugguagauggguucuuaauaaugagcauuacagagcucuaucaggaguuuucugugguguugaugcgaugaaucucauagcuaacaucuuuacuccucuugugcaaccugugggugcuuuagaugugucugcuucaguaguggcuggugguauuauugccauauuggugacuugugcugccuacuacuuuaugaaauucagacgugcuuuuggugaguacaaccauguuguugcugcuaaugcacuuuuguuuuugaugucuuucacuauacucugucuggcaccagcuuacagcuuucugccgggagucuacucagucuuuuacuuguacuugacauucuauuucaccaaugauguuucauucuuggcucaccuucaaugguuugccauguuuucuccuauugugccuuuuuggauaacagcaaucuauguauucuguauuucucugaagcacugccauugguucuuuaacaacuaucuuaggaaaagagucauguuuaauggaguuacauuuaguaccuucgaggaggcugcuuuguguaccuuuuugcucaacaaggaaauguaccuaaaauugcguagcgagacacuguugccacuuacacaguauaacagguaucuugcucuauauaacaaguacaaguauuucaguggagccuuagauacuaccagcuaucgugaagcagcuugcugccacuuagcaaaggcucuaaaugacuuuagcaacucaggugcugauguucucuaccaaccaccacagacaucaaucacuucugcuguucugcagagugguuuuaggaaaauggcauucccgucaggcaaaguugaagggugcaugguacaaguaaccuguggaacuacaacucuuaauggauugugguuggaugacacaguauacuguccaagacaugucauuugcacagcagaagacaugcuuaauccuaacuaugaagaucugcucauucgcaaauccaaccauagcuuucuuguucaggcuggcaauguucaacuucguguuauuggccauucuaugcaaaauugucugcuuaggcuuaaaguugauacuucuaacccuaagacacccaaguauaaauuuguccguauccaaccuggucaaacauuuucaguucuagcaugcuacaaugguucaccaucugguguuuaucagugugccaugagaccuaaucauaccauuaaagguucuuuccuuaauggaucaugugguaguguugguuuuaacauugauuaugauugcgugucuuucugcuauaugcaucauauggagcuuccaacaggaguacacgcugguacugacuuagaagguaaauucuaugguccauuuguugacagacaaacugcacaggcugcagguacagacacaaccauaacauuaaauguuuuggcauggcuguaugcugcuguuaucaauggugauaggugguuucuuaauagauucaccacuacuuugaaugacuuuaaccuuguggcaaugaaguacaacuaugaaccuuugacacaagaucauguugacauauugggaccucuuucugcucaaacaggaauugccgucuuagauaugugugcugcuuugaaagagcugcugcagaaugguaugaauggucguacuauccuugguagcacuauuuuagaagaugaguuuacaccauuugauguuguuagacaaugcucugguguuaccuuccaagguaaguucaagaaaauuguuaagggcacucaucauuggaugcuuuuaacuuucuugacaucacuauugauucuuguucaaaguacacaguggucacuguuuuucuuuguuuacgagaaugcuuucuugccauuuacucuugguauuauggcaauugcugcaugugcuaugcugcuuguuaagcauaagcacgcauucuugugcuuguuucuguuaccuucucuugcaacaguugcuuacuuuaauauggucuacaugccugcuagcugggugaugcguaucaugacauggcuugaauuggcugacacuagcuugucugguuauaggcuuaaggauuguguuauguaugcuucagcuuuaguuuugcuuauucucaugacagcucgcacuguuuaugaugaugcugcuagacguguuuggacacugaugaaugucauuacacuuguuuacaaagucuacuaugguaaugcuuuagaucaagcuauuuccaugugggccuuaguuauuucuguaaccucuaacuauucuggugucguuacgacuaucauguuuuuagcuagagcuauaguguuuguguguguugaguauuacccauuguuauuuauuacuggcaacaccuuacaguguaucaugcuuguuuauuguuucuuaggcuauuguugcugcugcuacuuuggccuuuucuguuuacucaaccguuacuucaggcuuacucuugguguuuaugacuacuuggucucuacacaagaauuuagguauaugaacucccaggggcuuuugccuccuaagaguaguauugaugcuuucaagcuuaacauuaaguuguuggguauuggagguaaaccauguaucaagguugcuacuguacagucuaaaaugucugacguaaagugcacaucugugguacugcucucgguucuucaacaacuuagaguagagucaucuucuaaauugugggcacaauguguacaacuccacaaugauauucuucuugcaaaagacacaacugaagcuuucgagaagaugguuucucuuuugucuguuuugcuauccaugcagggugcuguagacauuaauagguugugcgaggaaaugcucgauaaccgugcuacucuucaggcuauugcuucagaauuuaguucuuuaccaucauaugccgcuuaugccacugcccaggaggccuaugagcaggcuguagcuaauggugauucugaagucguucucaaaaaguuaaagaaaucuuugaauguggcuaaaucugaguuugaccgugaugcugccaugcaacgcaaguuggaaaagauggcagaucaggcuaugacccaaauguacaaacaggcaagaucugaggacaagagggcaaaaguaacuagugcuaugcaaacaaugcucuucacuaugcuuaggaagcuugauaaugaugcacuuaacaacauuaucaacaaugcgcgugaugguuguguuccacucaacaucauaccauugacuacagcagccaaacucaugguuguugucccugauuaugguaccuacaagaacacuugugaugguaacaccuuuacauaugcaucugcacucugggaaauccagcaaguuguugaugcggauagcaagauuguucaacuuagugaaauuaacauggacaauucaccaaauuuggcuuggccucuuauuguuacagcucuaagagccaacucagcuguuaaacuacagaauaaugaacugaguccaguagcacuacgacagauguccugugcggcugguaccacacaaacagcuuguacugaugacaaugcacuugccuacuauaacaauucgaagggagguagguuugugcuggcauuacuaucagaccaccaagaucucaaaugggcuagauucccuaagagugaugguacagguacaauuuacacagaacuggaaccaccuuguagguuuguuacagacacaccaaaagggccuaaagugaaauacuuguacuucaucaaaggcuuaaacaaccuaaauagagguauggugcugggcaguuuagcugcuacaguacgucuucaggcuggaaaugcuacagaaguaccugccaauucaacugugcuuuccuucugugcuuuugcaguagacccugcuaaagcauauaaggauuaccuagcaaguggaggacaaccaaucaccaacugugugaagauguuguguacacacacugguacaggacaggcaauuacuguaacaccagaagcuaacauggaccaagaguccuuugguggugcuucauguugucuguauuguagaugccacauugaccauccaaauccuaaaggauucugugacuugaaagguaaguacguccaaauaccuaccacuugugcuaaugacccaguggguuuuacacuuagaaacacagucuguaccgucugcggaauguggaaagguuauggcuguaguugugaccaacuccgcgaacccuugaugcagucugcggaugcaucaacguuuuuaaacggguuugcgguguaagugcagcccgucuuacaccgugcggcacaggcacuaguacugaugucgucuacagggcuuuugauauuuacaacgaaaaaguugcugguuuugcaaaguuccuaaaaacuaauugcugucgcuuccaggagaaggaugaggaaggcaauuuauuagacucuuacuuuguaguuaagaggcauacuaugucuaacuaccaacaugaagagacuauuuauaacuugguuaaagauuguccagcgguugcuguccaugacuuuuucaaguuuagaguagauggugacaugguaccacauauaucacgucagcgucuaacuaaauacacaauggcugauuuagucuaugcucuacgucauuuugaugaggguaauugugauacauuaaaagaaauacucgucacauacaauugcugugaugaugauuauuucaauaagaaggauugguaugacuucguagagaauccugacaucuuacgcguauaugcuaacuuaggugagcguguacgccaaucauuauuaaagacuguacaauucugcgaugcuaugcgugaugcaggcauuguaggcguacugacauuagauaaucaggaucuuaaugggaacugguacgauuucggugauuucguacaaguagcaccaggcugcggaguuccuauuguggauucauauuacucauugcugaugcccauccucacuuugacuagggcauuggcugcugagucccauauggaugcugaucucgcaaaaccacuuauuaagugggauuugcugaaauaugauuuuacggaagagagacuuugucucuucgaccguuauuuuaaauauugggaccagacauaccaucccaauuguauuaacuguuuggaugauagguguauccuucauugugcaaacuuuaauguguuauuuucuacuguguuuccaccuacaaguuuuggaccacuaguaagaaaaauauuuguagaugguguuccuuuuguuguuucaacuggauaccauuuucgugaguuaggagucguacauaaucaggauguaaacuuacauagcucgcgucucaguuucaaggaacuuuuaguguaugcugcugauccagcuaugcaugcagcuucuggcaauuuauugcuagauaaacgcacuacaugcuuuucaguagcugcacuaacaaacaauguugcuuuucaaacugucaaacccgguaauuuuaauaaagacuuuuaugacuuugcugugucuaaagguuucuuuaaggaaggaaguucuguugaacuaaaacacuucuucuuugcucaggauggcaacgcugcuaucagugauuaugacuauuaucguuauaaucugccaacaaugugugauaucagacaacuccuauucguaguugaaguuguugauaaauacuuugauuguuacgaugguggcuguauuaaugccaaccaaguaaucguuaacaaucuggauaaaucagcugguuucccauuuaauaaaugggguaaggcuagacuuuauuaugacucaaugaguuaugaggaucaagaugcacuuuucgcguauacuaagcguaaugucaucccuacuauaacucaaaugaaucuuaaguaugccauuagugcaaagaauagagcucgcaccguagcuggugucucuaucuguaguacuaugacaaauagacaguuucaucagaaauuauugaagucaauagccgccacuagaggagcuacugugguaauuggaacaagcaaguuuuacgguggcuggcauaauauguuaaaaacuguuuacagugauguagaaacuccacaccuuauggguugggauuauccaaaaugugacagagccaugccuaacaugcuuaggauaauggccucucuuguucuugcucgcaaacauaacacuugcuguaacuuaucacaccguuucuacagguuagcuaacgagugugcgcaaguauuaagugagauggucauguguggcggcucacuauauguuaaaccagguggaacaucauccggugaugcuacaacugcuuaugcuaauagugucuuuaacauuugucaagcuguuacagccaauguaaaugcacuucuuucaacugaugguaauaagauagcugacaaguauguccgcaaucuacaacacaggcucuaugagugucucuauagaaauagggauguugaucaugaauucguggaugaguuuuacgcuuaccugcguaaacauuucuccaugaugauucuuucugaugaugccguugugugcuauaacaguaacuaugcggcucaagguuuaguagcuagcauuaagaacuuuaaggcaguucuuuauuaucaaaauaauguguucaugucugaggcaaaauguuggacugagacugaccuuacuaaaggaccucacgaauuuugcucacagcauacaaugcuaguuaaacaaggagaugauuacguguaccugccuuacccagauccaucaagaauauuaggcgcaggcuguuuugucgaugauauugucaaaacagaugguacacuuaugauugaaagguucgugucacuggcuauugaugcuuacccacuuacaaaacauccuaaucaggaguaugcugaugucuuucacuuguauuuacaauacauuagaaaguuacaugaugagcuuacuggccacauguuggacauguauuccguaaugcuaacuaaugauaacaccucacgguacugggaaccugaguuuuaugaggcuauguacacaccacauacagucuugcaggcuguaggugcuuguguauugugcaauucacagacuucacuucguugcggugccuguauuaggagaccauuccuauguugcaagugcugcuaugaccaugucauuucaacaucacacaaauuaguguugucuguuaaucccuauguuugcaaugccccagguugugaugucacugaugugacacaacuguaucuaggagguaugagcuauuauugcaagucacauaagccucccauuaguuuuccauuaugugcuaauggucagguuuuugguuuauacaaaaacacauguguaggcagugacaaugucacugacuucaaugcgauagcaacaugugauuggacuaaugcuggcgauuacauacuugccaacacuuguacugagagacucaagcuuuucgcagcagaaacgcucaaagccacugaggaaacauuuaagcugucauaugguauugccacuguacgcgaaguacucucugacagagaauugcaucuuucaugggagguuggaaaaccuagaccaccauugaacagaaacuaugucuuuacugguuaccguguaacuaaaaauaguaaaguacagauuggagaguacaccuuugaaaaaggugacuauggugaugcuguuguguacagagguacuacgacauacaaguugaauguuggugauuacuuuguguugacaucucacacuguaaugccacuuagugcaccuacucuagugccacaagagcacuaugugagaauuacuggcuuguacccaacacucaacaucucagaugaguuuucuagcaauguugcaaauuaucaaaaggucggcaugcaaaaguacucuacacuccaaggaccaccugguacugguaagagucauuuugccaucggacuugcucucuauuacccaucugcucgcauaguguauacggcaugcucucaugcagcuguugaugcccuaugugaaaaggcauuaaaauauuugcccauagauaaauguaguagaaucauaccugcgcgugcgcgcguagaguguuuugauaaauucaaagugaauucaacacuagaacaguauguuuucugcacuguaaaugcauugccagaaacaacugcugacauuguagucuuugaugaaaucucuauggcuacuaauuaugacuugaguguugucaaugcuagacuucgugcaaaacacuacgucuauauuggcgauccugcucaauuaccagccccccgcacauugcugacuaaaggcacacuagaaccagaauauuuuaauucagugugcagacuuaugaaaacaauagguccagacauguuccuuggaacuugucgccguuguccugcugaaauuguugacacugugagugcuuuaguuuaugacaauaagcuaaaagcacacaaggagaagucagcucaaugcuucaaaauguucuacaaagguguuauuacacaugauguuucaucugcaaucaacagaccucaaauaggcguuguaagagaauuucuuacacgcaauccugcuuggagaaaagcuguuuuuaucucaccuuauaauucacagaacgcuguagcuucaaaaaucuuaggauugccuacgcagacuguugauucaucacaggguucugaauaugacuaugucauauucacacaaacuacugaaacagcacacucuuguaaugucaaccguuucaauguggcuaucacaagggcaaaaauuggcauuuugugcauaaugucugauagagaucuuuaugacaaacugcaauuuacaagucuagaaauaccacgucgcaauguggcuacauuacaagcagaaaauguaacuggacuuuuuaaggacuguaguaagaucauuacuggucuucauccuacacaggcaccuacacaccucagcguugauauaaaguucaagacugaaggauuauguguugacauaccaggcauaccaaaggacaugaccuaccguagacucaucucuaugauggguuucaaaaugaauuaccaagucaaugguuacccuaauauguuuaucacccgcgaagaagcuauucgucacguucgugcguggauuggcuuugauguagagggcugucaugcaacuagagaugcuguggguacuaaccuaccucuccagcuaggauuuucuacagguguuaacuuaguagcuguaccgacugguuauguugacacugaaaauaacacagaauucaccagaguuaaugcaaaaccuccaccaggugaccaguuuaaacaucuuauaccacucauguauaaaggcuugcccuggaauguagugcguauuaagauaguacaaaugcucagugauacacugaaaggauugucagacagagucguguucguccuuugggcgcauggcuuugagcuuacaucaaugaaguacuuugucaagauuggaccugaaagaacguguugucugugugacaaacgugcaacuugcuuuucuacuucaucagauacuuaugccugcuggaaucauucuguggguuuugacuaugucuauaacccauuuaugauugauguucagcaguggggcuuuacggguaaccuucagaguaaccaugaccaacauugccagguacauggaaaugcacauguggcuaguugugaugcuaucaugacuagauguuuagcaguccaugagugcuuuguuaagcgcguugauuggucuguugaauacccuauuauaggagaugaacugaggguuaauucugcuugcagaaaaguacaacacaugguugugaagucugcauugcuugcugauaaguuuccaguucuucaugacauuggaaauccaaaggcuaucaagugugugccucaggcugaaguagaauggaaguucuacgaugcucagccauguagugacaaagcuuacaaaauagaggagcucuucuauucuuaugcuacacaucacgauaaauucacugaugguguuuguuuguuuuggaauuguaacguugaucguuacccagccaaugcaauuguguguagguuugacacaagagucuugucaaacuugaacuuaccaggcugugauggugguaguuuguaugugaauaagcaugcauuccacacuccagcuuucgauaaaagugcauuuacuaauuuaaagcaauugccuuucuuuuacuauucugauaguccuugugagucucauggcaaacaaguagugucggauauugauuauguuccacucaaaucugcuacguguauuacacgaugcaauuuagguggugcuguuugcagacaccaugcaaaugaguaccgacaguacuuggaugcauauaauaugaugauuucugcuggauuuagccuauggauuuacaaacaauuugauacuuauaaccuguggaauacauuuaccagguuacagaguuuagaaaauguggcuuauaauguuguuaauaaaggacacuuugauggacacgccggcgaagcaccuguuuccaucauuaauaaugcuguuuacacaaagguagaugguauugauguggagaucuuugaaaauaagacaacacuuccuguuaauguugcauuugagcuuugggcuaagcguaacauuaaaccagugccagagauuaagauacucaauaauuuggguguugauaucgcugcuaauacuguaaucugggacuacaaaagagaagccccagcacauguaucuacaauaggugucugcacaaugacugacauugccaagaaaccuacugagagugcuuguucuucacuuacugucuuguuugaugguagaguggaaggacagguagaccuuuuuagaaacgcccguaaugguguuuuaauaacagaagguucagucaaaggucuaacaccuucaaagggaccagcacaagcuagcgucaauggagucacauuaauuggagaaucaguaaaaacacaguuuaacuacuuuaagaaaguagacggcauuauucaacaguugccugaaaccuacuuuacucagagcagagacuuagaggauuuuaagcccagaucacaaauggaaacugacuuucucgagcucgcuauggaugaauucauacagcgauauaagcucgagggcuaugccuucgaacacaucguuuauggagauuucagucauggacaacuuggcggucuucauuuaaugauaggcuuagccaagcgcucacaagauucaccacuuaaauuagaggauuuuaucccuauggacagcacagugaaaaauuacuucauaacagaugcgcaaacagguucaucaaaauguguguguucugugauugaucuuuuacuugaugacuuugucgagauaauaaagucacaagauuugucagugauuucaaaaguggucaagguuacaauugacuaugcugaaauuucauucaugcuuugguguaaggauggacauguugaaaccuucuacccaaaacuacaagcaagucaagcguggcaaccagguguugcgaugccuaacuuguacaagaugcaaagaaugcuucuugaaaagugugaccuucagaauuauggugaaaaugcuguuauaccaaaaggaauaaugaugaaugucgcaaaguauacucaacugugucaauacuuaaauacacuuacuuuagcuguacccuacaacaugagaguuauucacuuuggugcuggcucugauaaaggaguugcaccagguacagcugugcucagacaaugguugccaacuggcacacuacuugucgauucagaucuuaaugacuucgucuccgacgcagauucuacuuuaauuggagacugugcaacaguacauacggcuaauaaaugggaccuuauuauuagcgauauguaugacccuaggaccaaacaugugacaaaagagaaugacucuaaagaaggguuuuucacuuaucuguguggauuuauaaagcaaaaacuagcccugggugguucuauagcuguaaagauaacagagcauucuuggaaugcugaccuuuacaagcuuaugggccauuucucaugguggacagcuuuuguuacaaauguaaaugcaucaucaucggaagcauuuuuaauuggggcuaacuaucuuggcaagccgaaggaacaaauugauggcuauaccaugcaugcuaacuacauuuucuggaggaacacaaauccuauccaguugucuuccuauucacucuuugacaugagcaaauuuccucuuaaauuaagaggaacugcuguaaugucucuuaaggagaaucaaaucaaugauaugauuuauucucuucuggaaaaagguaggcuuaucauuagagaaaacaacagaguugugguuucaagugauauucuuguuaacaacuaaacgaacauguuuauuuucuuauuauuucuuacucucacuagugguagugaccuugaccggugcaccacuuuugaugauguucaagcuccuaauuacacucaacauacuucaucuaugagggggguuuacuauccugaugaaauuuuuagaucagacacucuuuauuuaacucaggauuuauuucuuccauuuuauucuaauguuacaggguuucauacuauuaaucauacguuugacaacccugucauaccuuuuaaggaugguauuuauuuugcugccacagagaaaucaaauguuguccgugguuggguuuuugguucuaccaugaacaacaagucacagucggugauuauuauuaacaauucuacuaauguuguuauacgagcauguaacuuugaauugugugacaacccuuucuuugcuguuucuaaacccauggguacacagacacauacuaugauauucgauaaugcauuuaauugcacuuucgaguacauaucugaugccuuuucgcuugauguuucagaaaagucagguaauuuuaaacacuuacgagaguuuguguuuaaaaauaaagauggguuucucuauguuuauaagggcuaucaaccuauagauguaguucgugaucuaccuucugguuuuaacacuuugaaaccuauuuuuaaguugccucuugguauuaacauuacaaauuuuagagccauucuuacagccuuuucaccugcucaagacacuuggggcacgucagcugcagccuauuuuguuggcuauuuaaagccaacuacauuuaugcucaaguaugaugaaaaugguacaaucacagaugcuguugauuguucucaaaauccacuugcugaacucaaaugcucuguuaagagcuuugagauugacaaaggaauuuaccagaccucuaauuucaggguuguucccucaggagauguugugagauucccuaauauuacaaacuuguguccuuuuggagagguuuuuaaugcuacuaaauucccuucugucuaugcaugggagagaaaaaaaauuucuaauuguguugcugauuacucugugcucuacaacucaacauuuuuuucaaccuuuaagugcuauggcguuucugccacuaaguugaaugaucuuugcuucuccaaugucuaugcagauucuuuuguagucaagggagaugauguaagacaaauagcgccaggacaaacugguguuauugcugauuauaauuauaaauugccagaugauuucauggguuguguccuugcuuggaauacuaggaacauugaugcuacuucaacugguaauuauaauuauaaauauagguaucuuagacauggcaagcuuaggcccuuugagagagacauaucuaaugugccuuucuccccugauggcaaaccuugcaccccaccugcucuuaauuguuauuggccauuaaaugauuaugguuuuuacaccacuacuggcauuggcuaccaaccuuacagaguuguaguacuuucuuuugaacuuuuaaaugcaccggccacgguuuguggaccaaaauuauccacugaccuuauuaagaaccagugugucaauuuuaauuuuaauggacucacugguacugguguguuaacuccuucuucaaagagauuucaaccauuucaacaauuuggccgugauguuucugauuucacugauuccguucgagauccuaaaacaucugaaauauuagacauuucaccuugcucuuuuggggguguaaguguaauuacaccuggaacaaaugcuucaucugaaguugcuguucuauaucaagauguuaacugcacugauguuucuacagcaauucaugcagaucaacucacaccagcuuggcgcauauauucuacuggaaacaauguauuccagacucaagcaggcugucuuauaggagcugagcaugucgacacuucuuaugagugcgacauuccuauuggagcuggcauuugugcuaguuaccauacaguuucuuuauuacguaguacuagccaaaaaucuauuguggcuuauacuaugucuuuaggugcugauaguucaauugcuuacucuaauaacaccauugcuauaccuacuaacuuuucaauuagcauuacuacagaaguaaugccuguuucuauggcuaaaaccuccguagauuguaauauguacaucugcggagauucuacugaaugugcuaauuugcuucuccaauaugguagcuuuugcacacaacuaaaucgugcacucucagguauugcugcugaacaggaucgcaacacacgugaaguguucgcucaagucaaacaaauguacaaaaccccaacuuugaaauauuuuggugguuuuaauuuuucacaaauauuaccugacccucuaaagccaacuaagaggucuuuuauugaggacuugcucuuuaauaaggugacacucgcugaugcuggcuucaugaagcaauauggcgaaugccuaggugauauuaaugcuagagaucucauuugugcgcagaaguucaauggacuuacaguguugccaccucugcucacugaugauaugauugcugccuacacugcugcucuaguuagugguacugccacugcuggauggacauuuggugcuggcgcugcucuucaaauaccuuuugcuaugcaaauggcauauagguucaauggcauuggaguuacccaaaauguucucuaugagaaccaaaaacaaaucgccaaccaauuuaacaaggcgauuagucaaauucaagaaucacuuacaacaacaucaacugcauugggcaagcugcaagacguuguuaaccagaaugcucaagcauuaaacacacuuguuaaacaacuuagcucuaauuuuggugcaauuucaagugugcuaaaugauauccuuucgcgacuugauaaagucgaggcggagguacaaauugacagguuaauuacaggcagacuucaaagccuucaaaccuauguaacacaacaacuaaucagggcugcugaaaucagggcuucugcuaaucuugcugcuacuaaaaugucugaguguguucuuggacaaucaaaaagaguugacuuuuguggaaagggcuaccaccuuauguccuucccacaagcagccccgcaugguguugucuuccuacaugucacguaugugccaucccaggagaggaacuucaccacagcgccagcaauuugucaugaaggcaaagcauacuucccucgugaagguguuuuuguguuuaauggcacuucuugguuuauuacacagaggaacuucuuuucuccacaaauaauuacuacagacaauacauuugucucaggaaauugugaugucguuauuggcaucauuaacaacacaguuuaugauccucugcaaccugagcuugacucauucaaagaagagcuggacaaguacuucaaaaaucauacaucaccagauguugaucuuggcgacauuucaggcauuaacgcuucugucgucaacauucaaaaagaaauugaccgccucaaugaggucgcuaaaaauuuaaaugaaucacucauugaccuucaagaauugggaaaauaugagcaauauauuaaauggccuugguauguuuggcucggcuucauugcuggacuaauugccaucgucaugguuacaaucuugcuuuguugcaugacuaguuguugcaguugccucaagggugcaugcucuugugguucuugcugcaaguuugaugaggaugacucugagccaguucucaagggugucaaauuacauuacacauaaacgaacuuauggauuuguuuaugagauuuuuuacucuuggaucaauuacugcacagccaguaaaaauugacaaugcuucuccugcaaguacuguucaugcuacagcaacgauaccgcuacaagccucacucccuuucggauggcuuguuauuggcguugcauuucuugcuguuuuucagagcgcuaccaaaauaauugcgcucaauaaaagauggcagcuagcccuuuauaagggcuuccaguucauuugcaauuuacugcugcuauuuguuaccaucuauucacaucuuuugcuugucgcugcagguauggaggcgcaauuuuuguaccucuaugccuugauauauuuucuacaaugcaucaacgcauguagaauuauuaugagauguuggcuuuguuggaagugcaaauccaagaacccauuacuuuaugaugccaacuacuuuguuugcuggcacacacauaacuaugacuacuguauaccauauaacagugucacagauacaauugucguuacugaaggugacggcauuucaacaccaaaacucaaagaagacuaccaaauuggugguuauucugaggauaggcacucagguguuaaagacuaugucguuguacauggcuauuucaccgaaguuuacuaccagcuugagucuacacaaauuacuacagacacugguauugaaaaugcuacauucuucaucuuuaacaagcuuguuaaagacccaccgaaugugcaaauacacacaaucgacggcucuucaggaguugcuaauccagcaauggauccaauuuaugaugagccgacgacgacuacuagcgugccuuuguaagcacaagaaagugaguacgaacuuauguacucauucguuucggaagaaacagguacguuaauaguuaauagcguacuucuuuuucuugcuuucgugguauucuugcuagucacacuagccauccuuacugcgcuucgauugugugcguacugcugcaauauuguuaacgugaguuuaguaaaaccaacgguuuacgucuacucgcguguuaaaaaucugaacucuucugaaggaguuccugaucuucuggucuaaacgaacuaacuauuauuauuauucuguuuggaacuuuaacauugcuuaucauggcagacaacgguacuauuaccguugaggagcuuaaacaacuccuggaacaauggaaccuaguaauagguuuccuauuccuagccuggauuauguuacuacaauuugccuauucuaaucggaacagguuuuuguacauaauaaagcuuguuuuccucuggcucuuguggccaguaacacuugcuuguuuugugcuugcugcugucuacagaauuaauugggugacuggcgggauugcgauugcaauggcuuguauuguaggcuugauguggcuuagcuacuucguugcuuccuucaggcuguuugcucguacccgcucaauguggucauucaacccagaaacaaacauucuucucaaugugccucuccgggggacaauugugaccagaccgcucauggaaagugaacuugucauuggugcugugaucauucguggucacuugcgaauggccggacacucccuagggcgcugugacauuaaggaccugccaaaagagaucacuguggcuacaucacgaacgcuuucuuauuacaaauuaggagcgucgcagcguguaggcacugauucagguuuugcugcauacaaccgcuaccguauuggaaacuauaaauuaaauacagaccacgccgguagcaacgacaauauugcuuugcuaguacaguaagugacaacagauguuucaucuuguugacuuccagguuacaauagcagagauauugauuaucauuaugaggacuuucaggauugcuauuuggaaucuugacguuauaauaaguucaauagugagacaauuauuuaagccucuaacuaagaagaauuauucggaguuagaugaugaagaaccuauggaguuagauuauccauaaaacgaacaugaaaauuauucucuuccugacauugauuguauuuacaucuugcgagcuauaucacuaucaggaguguguuagagguacgacuguacuacuaaaagaaccuugcccaucaggaacauacgagggcaauucaccauuucacccucuugcugacaauaaauuugcacuaacuugcacuagcacacacuuugcuuuugcuugugcugacgguacucgacauaccuaucagcugcgugcaagaucaguuucaccaaaacuuuucaucagacaagaggagguucaacaagagcucuacucgccacuuuuucucauuguugcugcucuaguauuuuuaauacuuugcuucaccauuaagagaaagacagaaugaaugagcucacuuuaauugacuucuauuugugcuuuuuagccuuucugcuauuccuuguuuuaauaaugcuuauuauauuuugguuuucacucgaaauccaggaucuagaagaaccuuguaccaaagucuaaacgaacaugaaacuucucauuguuuugacuuguauuucucuaugcaguugcauacgcacuguaguacagcgcugugcaucuaauaaaccucaugugcuugaagauccuuguaagguacaacacuagggguaauacuuauagcacugcuuggcuuugugcucuaggaaagguuuuaccuuuucauagauggcacacuaugguucaaacaugcacaccuaauguuacuaucaacugucaagauccagcugguggugcgcuuauagcuagguguugguaccuucaugaaggucaccaaacugcugcauuuagagacguacuuguuguuuuaaauaaacgaacaaauuaaaaugucugauaauggaccccaaucaaaccaacguagugccccccgcauuacauuugguggacccacagauucaacugacaauaaccagaauggaggacgcaauggggcaaggccaaaacagcgccgaccccaagguuuacccaauaauacugcgucuugguucacagcucucacucagcauggcaaggaggaacuuagauucccucgaggccagggcguuccaaucaacaccaauagugguccagaugaccaaauuggcuacuaccgaagagcuacccgacgaguucgugguggugacggcaaaaugaaagagcucagccccagaugguacuucuauuaccuaggaacuggcccagaagcuucacuucccuacggcgcuaacaaagaaggcaucguauggguugcaacugagggagccuugaauacacccaaagaccacauuggcacccgcaauccuaauaacaaugcugccaccgugcuacaacuuccucaaggaacaacauugccaaaaggcuucuacgcagagggaagcagaggcggcagucaagccucuucucgcuccucaucacguagucgcgguaauucaagaaauucaacuccuggcagcaguaggggaaauucuccugcucgaauggcuagcggagguggugaaacugcccucgcgcuauugcugcuagacagauugaaccagcuugagagcaaaguuucugguaaaggccaacaacaacaaggccaaacugucacuaagaaaucugcugcugaggcaucuaaaaagccucgccaaaaacguacugccacaaaacaguacaacgucacucaagcauuugggagacgugguccagaacaaacccaaggaaauuucggggaccaagaccuaaucagacaaggaacugauuacaaacauuggccgcaaauugcacaauuugcuccaagugccucugcauucuuuggaaugucacgcauuggcauggaagucacaccuucgggaacauggcugacuuaucauggagccauuaaauuggaugacaaagauccacaauucaaagacaacgucauacugcugaacaagcacauugacgcauacaaaacauucccaccaacagagccuaaaaaggacaaaaagaaaaagacugaugaagcucagccuuugccgcagagacaaaagaagcagcccacugugacucuucuuccugcggcugacauggaugauuucuccagacaacuucaaaauuccaugaguggagcuucugcugauucaacucaggcauaaacacucaugaugaccacacaaggcagaugggcuauguaaacguuuucgcaauuccguuuacgauacauagucuacucuugugcagaaugaauucucguaacuaaacagcacaaguagguuuaguuaacuuuaaucucacauagcaaucuuuaaucaauguguaacauuagggaggacuugaaagagccaccacauuuucaucgaggccacgcggaguacgaucgaggguacagugaauaaugcuagggagagcugccuauauggaagagcccuaauguguaaaauuaauuuuaguagugcuauccccaugugauuuuaauagcuucuuaggagaaugacaaaaaaaaaaaaaaaaaaaaaaaa

SEQ ID NO: 32 - DNA, 28411 bp, Artificial Sequence
  T7-scv1-luc-GFP replicon
gcggccgctaatacgactcactatagatattaggtttttacctacccaggaaaagccaaccaacctcgatctcttgtagatctgttctctaaacgaactttaaaatctgtgtagctgtcgctcggctgcatgcctagtgcacctacgcagtataaacaataataaattttactgtcgttgacaagaaacgagtaactcgtccctcttctgcagactgcttacggtttcgtccgtgttgcagtcgatcatcagcatacctaggtttcgtccgggtgtgaccgaaaggtaagatggagagccttgttcttggtgtcaacgagaaaacacacgtccaactcagtttgcctgtccttcaggttagagacgtgctagtgcgtggcttcggggactctgtggaagaggccctatcggaggcacgtgaacacctcaaaaatggcacttgtggtctagtagagctggaaaaaggcgtactgccccagcttgaacagccctatgtgttcattaaacgttctgatgccttaagcaccaatcacggccacaaggtcgttgagctggttgcagaaatggacggcattcagtacggtcgtagcggtataacactgggagtactcgtgccacatgtgggcgaaaccccaattgcataccgcaatgttcttcttcgtaagaacggtaataagggagccggtggtcatagctatggcatcgatctaaagtcttatgacttaggtgacgagcttggcactgatcccattgaagattatgaacaaaactggaacactaagcatggcagtggtgcactccgtgaactcactcgtgagctcaatggaggtgcagtcactcgctatgtcgacaacaatttctgtggcccagatgggtaccctcttgattgcatcaaagattttctcgcacgcgcgggcaagtcaatgtgcactctttccgaacaacttgattacatcgagtcgaagagaggtgtctactgctgccgtgaccatgagcatgaaattgcctggttcactgagcgctctgataagagctacgagcaccagacacccttcgaaattaagagtgccaagaaatttgacactttcaaaggggaatgcccaaagtttgtgtttcctcttaactcaaaagtcaaagtcattcaaccacgtgttgaaaagaaaaagactgagggtttcatggggcgtatacgctctgtgtaccctgttgcatctccacaggagtgtaacaatatgcacttgtctaccttgatgaaatgtaatcattgcgatgaagtttcatggcagacgtgcgactttctgaaagccacttgtgaacattgtggcactgaaaatttagttattgaaggacctactacatgtgggtacctacctactaatgctgtagtgaaaatgccatgtcctgcctgtcaagacccagagattggacctgagcatagtgttgcagattatcacaaccactcaaacattgaaactcgactccgcaagggaggtaggactagatgttttggaggctgtgtgtttgcctatgttggctgctataataagcgtgcctactgggttcctcgtgctagtgctgatattggctcaggccatactggcattactggtgacaatgtggagaccttgaatgaggatctccttgagatactgagtcgtgaacgtgttaacattaacattgttggcgattttcatttgaatgaagaggttgccatcattttggcatctttctctgcttctacaagtgcctttattgacactataaagagtcttgattacaagtctttcaaaaccattgttgagtcctgcggtaactataaagttaccaagggaaagcccgtaaaaggtgcttggaacattggacaacagagatcagttttaacaccactgtgtggttttccctcacaggctgctggtgttatcagatcaatttttgcgcgcacacttgatgcagcaaaccactcaattcctgatttgcaaagagcagctgtcaccatacttgatggtatttctgaacagtcattacgtcttgtcgacgccatggtttatacttcagacctgctcaccaacagtgtcattattatggcatatgtaactggtggtcttgtacaacagacttctcagtggttgtctaatcttttgggcactactgttgaaaaactcaggcctatctttgaatggattgaggcgaaacttagtgcaggagttgaatttctcaaggatgcttgggagattctcaaatttctcattacaggtgtttttgacatcgtcaagggtcaaatacaggttgcttcagataacatcaaggattgtgtaaaatgcttcattgatgttgttaacaaggcactcgaaatgtgcattgatcaagtcactatcgctggcgcaaagttgcgatcactcaacttaggtgaagtcttcatcgctcaaagcaagggactttaccgtcagtgtatacgtggcaaggagcagctgcaactactcatgcctcttaaggcaccaaaagaagtaacctttcttgaaggtgattcacatgacacagtacttacctctgaggaggttgttctcaagaacggtgaactcgaagcactcgagacgcccgttgatagcttcacaaatggagctatcgttggcacaccagtctgtgtaaatggcctcatgctcttagagattaaggacaaagaacaatactgcgcattgtctcctggtttactggctacaaacaatgtctttcgcttaaaagggggtgcaccaattaaaggtgtaacctttggagaagatactgtttgggaagttcaaggttacaagaatgtgagaatcacatttgagcttgatgaacgtgttgacaaagtgcttaatgaaaagtgctctgtctacactgttgaatccggtaccgaagttactgagtttgcatgtgttgtagcagaggctgttgtgaagactttacaaccagtttctgatctccttaccaacatgggtattgatcttgatgagtggagtgtagctacattctacttatttgatgatgctggtgaagaaaacttttcatcacgtatgtattgttccttttaccctccagatgaggaagaagaggacgatgcagagtgtgaggaagaagaaattgatgaaacctgtgaacatgagtacggtacagaggatgattatcaaggtctccctctggaatttggtgcctcagctgaaacagttcgagttgaggaagaagaagaggaagactggctggatgatactactgagcaatcagagattgagccagaaccagaacctacacctgaagaaccagttaatcagtttactggttatttaaaacttactgacaatgttgccattaaatgtgttgacatcgttaaggaggcacaaagtgctaatcctatggtgattgtaaatgctgctaacatacacctgaaacatggtggtggtgtagcaggtgcactcaacaaggcaaccaatggtgccatgcaaaaggagagtgatgattacattaagctaaatggccctcttacagtaggagggtcttgtttgctttctggacataatcttgctaagaagtgtctgcatgttgttggacctaacctaaatgcaggtgaggacatccagcttcttaaggcagcatatgaaaatttcaattcacaggacatcttacttgcaccattgttgtcagcaggcatatttggtgctaaaccacttcagtctttacaagtgtgcgtgcagacggttcgtacacaggtttatattgcagtcaatgacaaagctctttatgagcaggttgtcatggattatcttgataacctgaagcctagagtggaagcacctaaacaagaggagccaccaaacacagaagattccaaaactgaggagaaatctgtcgtacagaagcctgtcgatgtgaagccaaaaattaaggcctgcattgatgaggttaccacaacactggaagaaactaagtttcttaccaataagttactcttgtttgctgatatcaatggtaagctttaccatgattctcagaacatgcttagaggtgaagatatgtctttccttgagaaggatgcaccttacatggtaggtgatgttatcactagtggtgatatcacttgtgttgtaataccctccaaaaaggctggtggcactactgagatgctctcaagagctttgaagaaagtgccagttgatgagtatataaccacgtaccctggacaaggatgtgctggttatacacttgaggaagctaagactgctcttaagaaatgcaaatctgcattttatgtactaccttcagaagcacctaatgctaaggaagagattctaggaactgtatcctggaatttgagagaaatgcttgctcatgctgaagagacaagaaaattaatgcctatatgcatggatgttagagccataatggcaaccatccaacgtaagtataaaggaattaaaattcaagagggcatcgttgactatggtgtccgattcttcttttatactagtaaagagcctgtagcttctattattacgaagctgaactctctaaatgagccgcttgtcacaatgccaattggttatgtgacacatggttttaatcttgaagaggctgcgcgctgtatgcgttctcttaaagctcctgccgtagtgtcagtatcatcaccagatgctgttactacatataatggatacctcacttcgtcatcaaagacatctgaggagcactttgtagaaacagtttctttggctggctcttacagagattggtcctattcaggacagcgtacagagttaggtgttgaatttcttaagcgtggtgacaaaattgtgtaccacactctggagagccccgtcgagtttcatcttgacggtgaggttctttcacttgacaaactaaagagtctcttatccctgcgggaggttaagactataaaagtgttcacaactgtggacaacactaatctccacacacagcttgtggatatgtctatgacatatggacagcagtttggtccaacatacttggatggtgctgatgttacaaaaattaaacctcatgtaaatcatgagggtaagactttctttgtactacctagtgatgacacactacgtagtgaagctttcgagtactaccatactcttgatgagagttttcttggtaggtacatgtctgctttaaaccacacaaagaaatggaaatttcctcaagttggtggtttaacttcaattaaatgggctgataacaattgttatttgtctagtgttttattagcacttcaacagcttgaagtcaaattcaatgcaccagcacttcaagaggcttattatagagcccgtgctggtgatgctgctaacttttgtgcactcatactcgcttacagtaataaaactgttggcgagcttggtgatgtcagagaaactatgacccatcttctacagcatgctaatttggaatctgcaaagcgagttcttaatgtggtgtgtaaacattgtggtcagaaaactactaccttaacgggtgtagaagctgtgatgtatatgggtactctatcttatgataatcttaagacaggtgtttccattccatgtgtgtgtggtcgtgatgctacacaatatctagtacaacaagagtcttcttttgttatgatgtctgcaccacctgctgagtataaattacagcaaggtacattcttatgtgcgaatgagtacactggtaactatcagtgtggtcattacactcatataactgctaaggagaccctctatcgtattgacggagctcaccttacaaagatgtcagagtacaaaggaccagtgactgatgttttctacaaggaaacatcttacactacaaccatcaagcctgtgtcgtataaactcgatggagttacttacacagagattgaaccaaaattggatgggtattataaaaaggataatgcttactatacagagcagcctatagaccttgtaccaactcaaccattaccaaatgcgagttttgataatttcaaactcacatgttctaacacaaaatttgctgatgatttaaatcaaatgacaggcttcacaaagccagcttcacgagagctatctgtcacattcttcccagacttgaatggcgatgtagtggctattgactatagacactattcagcgagtttcaagaaaggtgctaaattactgcataagccaattgtttggcacattaaccaggctacaaccaagacaacgttcaaaccaaacacttggtgtttacgttgtctttggagtacaaagccagtagatacttcaaattcatttgaagttctggcagtagaagacacacaaggaatggacaatcttgcttgtgaaagtcaacaacccacctctgaagaagtagtggaaaatcctaccatacagaaggaagtcatagagtgtgacgtgaaaactaccgaagttgtaggcaatgtcatacttaaaccatcagatgaaggtgttaaagtaacacaagagttaggtcatgaggatcttatggctgcttatgtggaaaacacaagcattaccattaagaaacctaatgagctttcactagccttaggtttaaaaacaattgccactcatggtattgctgcaattaatagtgttccttggagtaaaattttggcttatgtcaaaccattcttaggacaagcagcaattacaacatcaaattgcgctaagagattagcacaacgtgtgtttaacaattatatgccttatgtgtttacattattgttccaattgtgtacttttactaaaagtaccaattctagaattagagcttcactacctacaactattgctaaaaatagtgttaagagtgttgctaaattatgtttggatgccggcattaattatgtgaagtcacccaaattttctaaattgttcacaatcgctatgtggctattgttgttaagtatttgcttaggttctctaatctgtgtaactgctgcttttggtgtactcttatctaattttggtgctccttcttattgtaatggcgttagagaattgtatcttaattcgtctaacgttactactatggatttctgtgaaggttcttttccttgcagcatttgtttaagtggattagactcccttgattcttatccagctcttgaaaccattcaggtgacgatttcatcgtacaagctagacttgacaattttaggtctggccgctgagtgggttttggcatatatgttgttcacaaaattcttttatttattaggtctttcagctataatgcaggtgttctttggctattttgctagtcatttcatcagcaattcttggctcatgtggtttatcattagtattgtacaaatggcacccgtttctgcaatggttaggatgtacatcttctttgcttctttctactacatatggaagagctatgttcatatcatggatggttgcacctcttcgacttgcatgatgtgctataagcgcaatcgtgccacacgcgttgagtgtacaactattgttaatggcatgaagagatctttctatgtctatgcaaatggaggccgtggcttctgcaagactcacaattggaattgtctcaattgtgacacattttgcactggtagtacattcattagtgatgaagttgctcgtgatttgtcactccagtttaaaagaccaatcaaccctactgaccagtcatcgtatattgttgatagtgttgctgtgaaaaatggcgcgcttcacctctactttgacaaggctggtcaaaagacctatgagagacatccgctctcccattttgtcaatttagacaatttgagagctaacaacactaaaggttcactgcctattaatgtcatagtttttgatggcaagtccaaatgcgacgagtctgcttctaagtctgcttctgtgtactacagtcagctgatgtgccaacctattctgttgcttgaccaagttcttgtatcagacgttggagatagtactgaagtttccgttaagatgtttgatgcttatgtcgacaccttttcagcaacttttagtgttcctatggaaaaacttaaggcacttgttgctacagctcacagcgagttagcaaagggtgtagctttagatggtgtcctttctacattcgtgtcagctgcccgacaaggtgttgttgataccgatgttgacacaaaggatgttattgaatgtctcaaactttcacatcactctgacttagaagtgacaggtgacagttgtaacaatttcatgctcacctataataaggttgaaaacatgacgcccagagatcttggcgcatgtattgactgtaatgcaaggcatatcaatgcccaagtagcaaaaagtcacaatgtttcactcatctggaatgtaaaagactacatgtctttatctgaacagctgcgtaaacaaattcgtagtgctgccaagaagaacaacataccttttagactaacttgtgctacaactagacaggttgtcaatgtcataactactaaaatctcactcaagggtggtaagattgttagtacttgttttaaacttatgcttaaggccacattattgtgcgttcttgctgcattggtttgttatatcgttatgccagtacatacattgtcaatccatgatggttacacaaatgaaatcattggttacaaagccattcaggatggtgtcactcgtgacatcatttctactgatgattgttttgcaaataaacatgctggttttgacgcatggtttagccagcgtggtggttcatacaaaaatgacaaaagctgccctgtagtagctgctatcattacaagagagattggtttcatagtgcctggcttaccgggtactgtgctgagagcaatcaatggtgacttcttgcattttctacctcgtgtttttagtgctgttggcaacatttgctacacaccttccaaactcattgagtatagtgattttgctacctctgcttgcgttcttgctgctgagtgtacaatttttaaggatgctatgggcaaacctgtgccatattgttatgacactaatttgctagagggttctatttcttatagtgagcttcgtccagacactcgttatgtgcttatggatggttccatcatacagtttcctaacacttacctggagggttctgttagagtagtaacaacttttgatgctgagtactgtagacatggtacatgcgaaaggtcagaagtaggtatttgcctatctaccagtggtagatgggttcttaataatgagcattacagagctctatcaggagttttctgtggtgttgatgcgatgaatctcatagctaacatctttactcctcttgtgcaacctgtgggtgctttagatgtgtctgcttcagtagtggctggtggtattattgccatattggtgacttgtgctgcctactactttatgaaattcagacgtgtttttggtgagtacaaccatgttgttgctgctaatgcacttttgtttttgatgtctttcactatactctgtctggtaccagcttacagctttctgccgggagtctactcagtcttttacttgtacttgacattctatttcaccaatgatgtttcattcttggctcaccttcaatggtttgccatgttttctcctattgtgcctttttggataacagcaatctatgtattctgtatttctctgaagcactgccattggttctttaacaactatcttaggaaaagagtcatgtttaatggagttacatttagtaccttcgaggaggctgctttgtgtacctttttgctcaacaaggaaatgtacctaaaattgcgtagcgagacactgttgccacttacacagtataacaggtatcttgctctatataacaagtacaagtatttcagtggagccttagatactaccagctatcgtgaagcagcttgctgccacttagcaaaggctctaaatgactttagcaactcaggtgctgatgttctctaccaaccaccacagacatcaatcacttctgctgttctgcagagtggttttaggaaaatggcattcccgtcaggcaaagttgaagggtgcatggtacaagtaacctgtggaactacaactcttaatggattgtggttggatgacacagtatactgtccaagacatgtcatttgcacagcagaagacatgcttaatcctaactatgaagatctgctcattcgcaaatccaaccatagctttcttgttcaggctggcaatgttcaacttcgtgttattggccattctatgcaaaattgtctgcttaggcttaaagttgatacttctaaccctaagacacccaagtataaatttgtccgtatccaacctggtcaaacattttcagttctagcatgctacaatggttcaccatctggtgtttatcagtgtgccatgagacctaatcataccattaaaggttctttccttaatggatcatgtggtagtgttggttttaacattgattatgattgcgtgtctttctgctatatgcatcatatggagcttccaacaggagtacacgctggtactgacttagaaggtaaattctatggtccatttgttgacagacaaactgcacaggctgcaggtacagacacaaccataacattaaatgttttggcatggctgtatgctgctgttatcaatggtgataggtggtttcttaatagattcaccactactttgaatgactttaaccttgtggcaatgaagtacaactatgaacctttgacacaagatcatgttgacatattgggacctctttctgctcaaacaggaattgccgtcttagatatgtgtgctgctttgaaagagctgctgcagaatggtatgaatggtcgtactatccttggtagcactattttagaagatgagtttacaccatttgatgttgttagacaatgctctggtgttaccttccaaggtaagttcaagaaaattgttaagggcactcatcattggatgcttttaactttcttgacatcactattgattcttgttcaaagtacacagtggtcactgtttttctttgtttacgagaatgctttcttgccatttactcttggtattatggcaattgctgcatgtgctatgctgcttgttaagcataagcacgcattcttgtgcttgtttctgttaccttctcttgcaacagttgcttactttaatatggtctacatgcctgctagctgggtgatgcgtatcatgacatggcttgaattggctgacactagcttgtctggttataggcttaaggattgtgttatgtatgcttcagctttagttttgcttattctcatgacagctcgcactgtttatgatgatgctgctagacgtgtttggacactgatgaatgtcattacacttgtttacaaagtctactatggtaatgctttagatcaagctatttccatgtgggccttagttatttctgtaacctctaactattctggtgtcgttacgactatcatgtttttagctagagctatagtgtttgtgtgtgttgagtattacccattgttatttattactggcaacaccttacagtgtatcatgcttgtttattgtttcttaggctattgttgctgctgctactttggccttttctgtttactcaaccgttacttcaggcttactcttggtgtttatgactacttggtctctacacaagaatttaggtatatgaactcccaggggcttttgcctcctaagagtagtattgatgctttcaagcttaacattaagttgttgggtattggaggtaaaccatgtatcaaggttgctactgtacagtctaaaatgtctgacgtaaagtgcacatctgtggtactgctctcggttcttcaacaacttagagtagagtcatcttctaaattgtgggcacaatgtgtacaactccacaatgatattcttcttgcaaaagacacaactgaagctttcgagaagatggtttctcttttgtctgttttgctatccatgcagggtgctgtagacattaataggttgtgcgaggaaatgctcgataaccgtgctactcttcaggctattgcttcagaatttagttctttaccatcatatgccgcttatgccactgcccaggaggcctatgagcaggctgtagctaatggtgattctgaagtcgttctcaaaaagttaaagaaatctttgaatgtggctaaatctgagtttgaccgtgatgctgccatgcaacgcaagttggaaaagatggcagatcaggctatgacccaaatgtacaaacaggcaagatctgaggacaagagggcaaaagtaactagtgctatgcaaacaatgctcttcactatgcttaggaagcttgataatgatgcacttaacaacattatcaacaatgcgcgtgatggttgtgttccactcaacatcataccattgactacagcagccaaactcatggttgttgtccctgattatggtacctacaagaacacttgtgatggtaacacctttacatatgcatctgcactctgggaaatccagcaagttgttgatgcggatagcaagattgttcaacttagtgaaattaacatggacaattcaccaaatttggcttggcctcttattgttacagctctaagagccaactcagctgttaaactacagaataatgaactgagtccagtagcactacgacagatgtcctgtgcggctggtaccacacaaacagcttgtactgatgacaatgcacttgcctactataacaattcgaagggaggtaggtttgtgctggcattactatcagaccaccaagatctcaaatgggctagattccctaagagtgatggtacaggtacaatttacacagaactggaaccaccttgtaggtttgttacagacacaccaaaagggcctaaagtgaaatacttgtacttcatcaaaggcttaaacaacctaaatagaggtatggtgctgggcagtttagctgctacagtacgtcttcaggctggaaatgctacagaagtacctgccaattcaactgtgctttccttctgtgcttttgcagtagaccctgctaaagcatataaggattacctagcaagtggaggacaaccaatcaccaactgtgtgaagatgttgtgtacacacactggtacaggacaggcaattactgtaacaccagaagctaacatggaccaagagtcctttggtggtgcttcatgttgtctgtattgtagatgccacattgaccatccaaatcctaaaggattctgtgacttgaaaggtaagtacgtccaaatacctaccacttgtgctaatgacccagtgggttttacacttagaaacacagtctgtaccgtctgcggaatgtggaaaggttatggctgtagttgtgaccaactccgcgaacccttgatgcagtctgcggatgcatcaacgtttttaaacgggtttgcggtgtaagtgcagcccgtcttacaccgtgcggcacaggcactagtactgatgtcgtctacagggcttttgatatttacaacgaaaaagttgctggttttgcaaagttcctaaaaactaattgctgtcgcttccaggagaaggatgaggaaggcaatttattagactcttactttgtagttaagaggcatactatgtctaactaccaacatgaagagactatttataacttggttaaagattgtccagcggttgctgtccatgactttttcaagtttagagtagatggtgacatggtaccacatatatcacgtcagcgtctaactaaatacacaatggctgatttagtctatgctctacgtcattttgatgagggtaattgtgatacattaaaagaaatactcgtcacatacaattgctgtgatgatgattatttcaataagaaggattggtatgacttcgtagagaatcctgacatcttacgcgtatatgctaacttaggtgagcgtgtacgccaatcattattaaagactgtacaattctgcgatgctatgcgtgatgcaggcattgtaggcgtactgacattagataatcaggatcttaatgggaactggtacgatttcggtgatttcgtacaagtagcaccaggctgcggagttcctattgtggattcatattactcattgctgatgcccatcctcactttgactagggcattggctgctgagtcccatatggatgctgatctcgcaaaaccacttattaagtgggatttgctgaaatatgattttacggaagagagactttgtctcttcgaccgttattttaaatattgggaccagacataccatcccaattgtattaactgtttggatgataggtgtatccttcattgtgcaaactttaatgtgttattttctactgtgtttccacctacaagttttggaccactagtaagaaaaatatttgtagatggtgttccttttgttgtttcaactggataccattttcgtgagttaggagtcgtacataatcaggatgtaaacttacatagctcgcgtctcagtttcaaggaacttttagtgtatgctgctgatccagctatgcatgcagcttctggcaatttattgctagataaacgcactacatgcttttcagtagctgcactaacaaacaatgttgcttttcaaactgtcaaacccggtaattttaataaagacttttatgactttgctgtgtctaaaggtttctttaaggaaggaagttctgttgaactaaaacacttcttctttgctcaggatggcaacgctgctatcagtgattatgactattatcgttataatctgccaacaatgtgtgatatcagacaactcctattcgtagttgaagttgttgataaatactttgattgttacgatggtggctgtattaatgccaaccaagtaatcgttaacaatctggataaatcagctggtttcccatttaataaatggggtaaggctagactttattatgactcaatgagttatgaggatcaagatgcacttttcgcgtatactaagcgtaatgtcatccctactataactcaaatgaatcttaagtatgccattagtgcaaagaatagagctcgcaccgtagctggtgtctctatctgtagtactatgacaaatagacagtttcatcagaaattattgaagtcaatagccgccactagaggagctactgtggtaattggaacaagcaagttttacggtggctggcataatatgttaaaaactgtttacagtgatgtagaaactccacaccttatgggttgggattatccaaaatgtgacagagccatgcctaacatgcttaggataatggcctctcttgttcttgctcgcaaacataacacttgctgtaacttatcacaccgtttctacaggttagctaacgagtgtgcgcaagtattaagtgagatggtcatgtgtggcggctcactatatgttaaaccaggtggaacatcatccggtgatgctacaactgcttatgctaatagtgtctttaacatttgtcaagctgttacagccaatgtaaatgcacttctttcaactgatggtaataagatagctgacaagtatgtccgcaatctacaacacaggctctatgagtgtctctatagaaatagggatgttgatcatgaattcgtggatgagttttacgcttacctgcgtaaacatttctccatgatgattctttctgatgatgccgttgtgtgctataacagtaactatgcggctcaaggtttagtagctagcattaagaactttaaggcagttctttattatcaaaataatgtgttcatgtctgaggcaaaatgttggactgagactgaccttactaaaggacctcacgaattttgctcacagcatacaatgctagttaaacaaggagatgattacgtgtacctgccttacccagatccatcaagaatattaggcgcaggctgttttgtcgatgatattgtcaaaacagatggtacacttatgattgaaaggttcgtgtcactggctattgatgcttacccacttacaaaacatcctaatcaggagtatgctgatgtctttcacttgtatttacaatacattagaaagttacatgatgagcttactggccacatgttggacatgtattccgtaatgctaactaatgataacacctcacggtactgggaacctgagttttatgaggctatgtacacaccacatacagtcttgcaggctgtaggtgcttgtgtattgtgcaattcacagacttcacttcgttgcggtgcctgtattaggagaccattcctatgttgcaagtgctgctatgaccatgtcatttcaacatcacacaaattagtgttgtctgttaatccctatgtttgcaatgccccaggttgtgatgtcactgatgtgacacaactgtatctaggaggtatgagctattattgcaagtcacataagcctcccattagttttccattatgtgctaatggtcaggtttttggtttatacaaaaacacatgtgtaggcagtgacaatgtcactgacttcaatgcgatagcaacatgtgattggactaatgctggcgattacatacttgccaacacttgtactgagagactcaagcttttcgcagcagaaacgctcaaagccactgaggaaacatttaagctgtcatatggtattgctactgtacgcgaagtactctctgacagagaattgcatctttcatgggaggttggaaaacctagaccaccattgaacagaaactatgtctttactggttaccgtgtaactaaaaatagtaaagtacagattggagagtacacctttgaaaaaggtgactatggtgatgctgttgtgtacagaggtactacgacatacaagttgaatgttggtgattactttgtgttgacatctcacactgtaatgccacttagtgcacctactctagtgccacaagagcactatgtgagaattactggcttgtacccaacactcaacatctcagatgagttttctagcaatgttgcaaattatcaaaaggtcggcatgcaaaagtactctacactccaaggaccacctggtactggtaagagtcattttgccatcggacttgctctctattacccatctgctcgcatagtgtatacggcatgctctcatgcagctgttgatgccctatgtgaaaaggcattaaaatatttgcccatagataaatgtagtagaatcatacctgcgcgtgcgcgcgtagagtgttttgataaattcaaagtgaattcaacactagaacagtatgttttctgcactgtaaatgcattgccagaaacaactgctgacattgtagtctttgatgaaatctctatggctactaattatgacttgagtgttgtcaatgctagacttcgtgcaaaacactacgtctatattggcgatcctgctcaattaccagccccccgcacattgctgactaaaggcacactagaaccagaatattttaattcagtgtgcagacttatgaaaacaataggtccagacatgttccttggaacttgtcgccgttgtcctgctgaaattgttgacactgtgagtgctttagtttatgacaataagctaaaagcacacaaggataagtcagctcaatgcttcaaaatgttctacaaaggtgttattacacatgatgtttcatctgcaatcaacagacctcaaataggcgttgtaagagaatttcttacacgcaatcctgcttggagaaaagctgtttttatctcaccttataattcacagaacgctgtagcttcaaaaatcttaggattgcctacgcagactgttgattcatcacagggttctgaatatgactatgtcatattcacacaaactactgaaacagcacactcttgtaatgtcaaccgcttcaatgtggctatcacaagggcaaaaattggcattttgtgcataatgtctgatagagatctttatgacaaactgcaatttacaagtctagaaataccacgtcgcaatgtggctacattacaagcagaaaatgtaactggactttttaaggactgtagtaagatcattactggtcttcatcctacacaggcacctacacacctcagcgttgatataaagttcaagactgaaggattatgtgttgacataccaggcataccaaaggacatgacctaccgtagactcatctctatgatgggtttcaaaatgaattaccaagtcaatggttaccctaatatgtttatcacccgcgaagaagctattcgtcacgttcgtgcgtggattggctttgatgtagagggctgtcatgcaactagagatgctgtgggtactaacctacctctccagctaggattttctacaggtgttaacttagtagctgtaccgactggttatgttgacactgaaaataacacagaattcaccagagttaatgcaaaacctccaccaggtgaccagtttaaacatcttataccactcatgtataaaggcttgccctggaatgtagtgcgtattaagatagtacaaatgctcagtgatacactgaaaggattgtcagacagagtcgtgttcgtcctttgggcgcatggctttgagcttacatcaatgaagtactttgtcaagattggacctgaaagaacgtgttgtctgtgtgacaaacgtgcaacttgcttttctacttcatcagatacttatgcctgctggaatcattctgtgggttttgactatgtctataacccatttatgattgatgttcagcagtggggctttacgggtaaccttcagagtaaccatgaccaacattgccaggtacatggaaatgcacatgtggctagttgtgatgctatcatgactagatgtttagcagtccatgagtgctttgttaagcgcgttgattggtctgttgaataccctattataggagatgaactgagggttaattctgcttgcagaaaagtacaacacatggttgtgaagtctgcattgcttgctgataagtttccagttcttcatgacattggaaatccaaaggctatcaagtgtgtgcctcaggctgaagtagaatggaagttctacgatgctcagccatgtagtgacaaagcttacaaaatagaggagctcttctattcttatgctacacatcacgataaattcactgatggtgtttgtttgttttggaattgtaacgttgatcgttacccagccaatgcaattgtgtgtaggtttgacacaagagtcttgtcaaacttgaacttaccaggctgtgatggtggtagtttgtatgtgaataagcatgcattccacactccagctttcgataaaagtgcatttactaatttaaagcaattgcctttcttttactattctgatagtccttgtgagtctcatggcaaacaagtagtgtcggatattgattatgttccactcaaatctgctacgtgtattacacgatgcaatttaggtggtgctgtttgcagacaccatgcaaatgagtaccgacagtacttggatgcatataatatgatgatttctgctggatttagcctatggatttacaaacaatttgatacttataacctgtggaatacatttaccaggttacagagtttagaaaatgtggcttataatgttgttaataaaggacactttgatggacacgccggcgaagcacctgtttccatcattaataatgctgtttacacaaaggtagatggtattgatgtggagatctttgaaaataagacaacacttcctgttaatgttgcatttgagctttgggctaagcgtaacattaaaccagtgccagagattaagatactcaataatttgggtgttgatatcgctgctaatactgtaatctgggactacaaaagagaagccccagcacatgtatctacaataggtgtctgcacaatgactgacattgccaagaaacctactgagagtgcttgttcttcacttactgtcttgtttgatggtagagtggaaggacaggtagacctttttagaaacgcccgtaatggtgttttaataacagaaggttcagtcaaaggtctaacaccttcaaagggaccagcacaagctagcgtcaatggagtcacattaattggagaatcagtaaaaacacagtttaactactttaagaaagtagacggcattattcaacagttgcctgaaacctactttactcagagcagagacttagaggattttaagcccagatcacaaatggaaactgactttctcgagctcgctatggatgaattcatacagcgatataagctcgagggctatgccttcgaacacatcgtttatggagatttcagtcatggacaacttggcggtcttcatttaatgataggcttagccaagcgctcacaagattcaccacttaaattagaggattttatccctatggacagcacagtgaaaaattacttcataacagatgcgcaaacaggttcatcaaaatgtgtgtgttctgtgattgatcttttacttgatgactttgtcgagataataaagtcacaagatttgtcagtgatttcaaaagtggtcaaggttacaattgactatgctgaaatttcattcatgctttggtgtaaggatggacatgttgaaaccttctacccaaaactacaagcaagtcaagcgtggcaaccaggtgttgcgatgcctaacttgtacaagatgcaaagaatgcttcttgaaaagtgtgaccttcagaattatggtgaaaatgctgttataccaaaaggaataatgatgaatgtcgcaaagtatactcaactgtgtcaatacttaaatacacttactttagctgtaccctacaacatgagagttattcactttggtgctggctctgataaaggagttgcaccaggtacagctgtgctcagacaatggttgccaactggcacactacttgtcgattcagatcttaatgacttcgtctccgacgcagattctactttaattggagactgtgcaacagtacatacggctaataaatgggaccttattattagcgatatgtatgaccctaggaccaaacatgtgacaaaagagaatgactctaaagaagggtttttcacttatctgtgtggatttataaagcaaaaactagccctgggtggttctatagctgtaaagataacagagcattcttggaatgctgacctttacaagcttatgggccatttctcatggtggacagcttttgttacaaatgtaaatgcatcatcatcggaagcatttttaattggggctaactatcttggcaagccgaaggaacaaattgatggctataccatgcatgctaactacattttctggaggaacacaaatcctatccagttgtcttcctattcactctttgacatgagcaaatttcctcttaaattaagaggaactgctgtaatgtctcttaaggagaatcaaatcaatgatatgatttattctcttctggaaaaaggtaggcttatcattagagaaaacaacagagttgtggtttcaagtgatattcttgttaacaactaaacgaacatggaagatgccaaaaacattaagaagggcccagcgccattctacccactcgaagacgggaccgccggcgagcagctgcacaaagccatgaagcgctacgccctggtgcccggcaccatcgcctttaccgacgcacatatcgaggtggacattacctacgccgagtacttcgagatgagcgttcggctggcagaagctatgaagcgctatgggctgaatacaaaccatcggatcgtggtgtgcagcgagaatagcttgcagttcttcatgcccgtgttgggtgccctgttcatcggtgtggctgtggccccagctaacgacatctacaacgagcgcgagctgctgaacagcatgggcatcagccagcccaccgtcgtattcgtgagcaagaaagggctgcaaaagatcctcaacgtgcaaaagaagctaccgatcatacaaaagatcatcatcatggatagcaagaccgactaccagggcttccaaagcatgtacaccttcgtgacttcccatttgccacccggcttcaacgagtacgacttcgtgcccgagagcttcgaccgggacaaaaccatcgccctgatcatgaacagtagtggcagtaccggattgcccaagggcgtagccctaccgcaccgcaccgcttgtgtccgattcagtcatgcccgcgaccccatcttcggcaaccagatcatccccgacaccgctatcctcagcgtggtgccatttcaccacggcttcggcatgttcaccacgctgggctacttgatctgcggctttcgggtcgtgctcatgtaccgcttcgaggaggagctattcttgcgcagcttgcaagactataagattcaatctgccctgctggtgcccacactatttagcttcttcgctaagagcactctcatcgacaagtacgacctaagcaacttgcacgagatcgccagcggcggggcgccgctcagcaaggaggtaggtgaggccgtggccaaacgcttccacctaccaggcatccgccagggctacggcctgacagaaacaaccagcgccattctgatcacccccgaaggggacgacaagcctggcgcagtaggcaaggtggtgcccttcttcgaggctaaggtggtggacttggacaccggtaagacactgggtgtgaaccagcgcggcgagctgtgcgtccgtggccccatgatcatgagcggctacgttaacaaccccgaggctacaaacgctctcatcgacaaggacggctggctgcacagcggcgacatcgcctactgggacgaggacgagcacttcttcatcgtggaccggctgaagagcctgatcaaatacaagggctaccaggtagccccagccgaactggagagcatcctgctgcaacaccccaacatcttcgacgccggggtcgccggcctgcccgacgacgatgccggcgagctgcccgccgcagtcgtcgtgctggaacacggtaaaaccatgaccgagaaggagatcgtggactatgtggccagccaggttacaaccgccaagaagctgcgcggtggtgttgtgttcgtggacgaggtgcctaaaggactgaccggcaagttggacgcccgcaagatccgcgagattctcattaaggccaagaagggcggcaagatcgccgtgcagtcgacggtaccgcgggcccgggatccaccggtcgccaccatggtgagcaagggcgaggagctgttcaccggggtggtgcccatcctggtcgagctggacggcgacgtaaacggccacaagttcagcgtgtccggcgagggcgagggcgatgccacctacggcaagctgaccctgaagttcatctgcaccaccggcaagctgcccgtgccctggcccaccctcgtgaccaccctgacctacggcgtgcagtgcttcagccgctaccccgaccacatgaagcagcacgacttcttcaagtccgccatgcccgaaggctacgtccaggagcgcaccatcttcttcaaggacgacggcaactacaagacccgcgccgaggtgaagttcgagggcgacaccctggtgaaccgcatcgagctgaagggcatcgacttcaaggaggacggcaacatcctggggcacaagctggagtacaactacaacagccacaacgtctatatcatggccgacaagcagaagaacggcatcaaggtgaacttcaagatccgccacaacatcgaggacggcagcgtgcagctcgccgaccactaccagcagaacacccccatcggcgacggccccgtgctgctgcccgacaaccactacctgagcacccagtccgccctgagcaaagaccccaacgagaagcgcgatcacatggtcctgctggagttcgtgaccgccgccgggatcactctcggcatggacgagctgtacaagtaaacgaacttatggatttgtttatgagattttttactcttggatcaattactgcacagccagtaaaaattgacaatgcttctcctgcaagtactgttcatgctacagcaacgataccgctacaagcctcactccctttcggatggcttgttattggcgttgcatttcttgctgtttttcagagcgctaccaaaataattgcgctcaataaaagatggcagctagccctttataagggcttccagttcatttgcaatttactgctgctatttgttaccatctattcacatcttttgcttgtcgctgcaggtatggaggcgcaatttttgtacctctatgccttgatatattttctacaatgcatcaacgcatgtagaattattatgagatgttggctttgttggaagtgcaaatccaagaacccattactttatgatgccaactactttgtttgctggcacacacataactatgactactgtataccatataacagtgtcacagatacaattgtcgttactgaaggtgacggcatttcaacaccaaaactcaaagaagactaccaaattggtggttattctgaggataggcactcaggtgttaaagactatgtcgttgtacatggctatttcaccgaagtttactaccagcttgagtctacacaaattactacagacactggtattgaaaatgctacattcttcatctttaacaagcttgttaaagacccaccgaatgtgcaaatacacacaatcgacggctcttcaggagttgctaatccagcaatggatccaatttatgatgagccgacgacgactactagcgtgcctttgtaagcacaagaaagtgagtacgaacttatgatcgagcaggatggcctgcatgccggatctccagctgcctgggttgagagactgttcggctatgattgggcccagcagaccatcggctgttctgatgccgccgtgtttagactgagtgcccagggtagacccgtgctgttcgtgaaaaccgatctgtctggcgccctgaacgagctgcaggatgaagccgctagactgagctggctggctacaacaggcgtgccatgtgctgccgtgctggatgtggttacagaggccggaagagactggctgctgctgggagaagttccaggccaggatctgctgagcagtcatctggcccctgccgagaaggtgtccattatggccgatgccatgcggcggctgcacacacttgatcctgccacctgtcctttcgaccaccaagccaagcaccggatcgagagggccagaaccagaatggaagccggcctggtggaccaggacgacctggatgaagaacaccaaggactggccccagctgagctgttcgccagactgaaagccagaatgcccgacggcgaggatctggtggttacacatggggatgcctgcctgcctaacatcatggtggaaaacggccggttcagcggctttatcgactgtggcagactgggcgtcgccgacagatatcaggatatcgccctggccaccagagatatcgccgaagaacttggcggagagtgggccgatagattcctggtgctgtacggaatcgccgctcctgactctcagcggatcgccttctacagactgctggacgagttcttctaagtgacaacagatgtttcatcttgttgacttccaggttacaatagcagagatattgattatcattatgaggactttcaggattgctatttggaatcttgacgttataataagttcaatagtgagacaattatttaagcctctaactaagaagaattattcggagttagatgatgaagaacctatggagttagattatccataaaacgaacatgaaaattattctcttcctgacattgattgtatttacatcttgcgagctatatcactatcaggagtgtgttagaggtacgactgtactactaaaagaaccttgcccatcaggaacatacgagggcaattcaccatttcaccctcttgctgacaataaatttgcactaacttgcactagcacacactttgcttttgcttgtgctgacggtactcgacatacctatcagctgcgtgcaagatcagtttcaccaaaacttttcatcagacaagaggaggttcaacaagagctctactcgccactttttctcattgttgctgctctagtatttttaatactttgcttcaccattaagagaaagacagaatgaatgagctcactttaattgacttctatttgtgctttttagcctttctgctattccttgttttaataatgcttattatattttggttttcactcgaaatccaggatctagaagaaccttgtaccaaagtctaaacgaacatgaaacttctcattgttttgacttgtatttctctatgcagttgcatatgcactgtagtacagcgctgtgcatctaataaacctcatgtgcttgaagatccttgtaaggtacaacactaggggtaatacttatagcactgcttggctttgtgctctaggaaaggttttaccttttcatagatggcacactatggttcaaacatgcacacctaatgttactatcaactgtcaagatccagctggtggtgcgcttatagctaggtgttggtaccttcatgaaggtcaccaaactgctgcatttagagacgtacttgttgttttaaataaacgaacaaattaaaatgtctgataatggaccccaatcaaaccaacgtagtgccccccgcattacatttggtggacccacagattcaactgacaataaccagaatggaggacgcaatggggcaaggccaaaacagcgccgaccccaaggtttacccaataatactgcgtcttggttcacagctctcactcagcatggcaaggaggaacttagattccctcgaggccagggcgttccaatcaacaccaatagtggtccagatgaccaaattggctactaccgaagagctacccgacgagttcgtggtggtgacggcaaaatgaaagagctcagccccagatggtacttctattacctaggaactggcccagaagcttcacttccctacggcgctaacaaagaaggcatcgtatgggttgcaactgagggagccttgaatacacccaaagaccacattggcacccgcaatcctaataacaatgctgccaccgtgctacaacttcctcaaggaacaacattgccaaaaggcttctacgcagagggaagcagaggcggcagtcaagcctcttctcgctcctcatcacgtagtcgcggtaattcaagaaattcaactcctggcagcagtaggggaaattctcctgctcgaatggctagcggaggtggtgaaactgccctcgcgctattgctgctagacagattgaaccagcttgagagcaaagtttctggtaaaggccaacaacaacaaggccaaactgtcactaagaaatctgctgctgaggcatctaaaaagcctcgccaaaaacgtactgccacaaaacagtacaacgtcactcaagcatttgggagacgtggtccagaacaaacccaaggaaatttcggggaccaagacctaatcagacaaggaactgattacaaacattggccgcaaattgcacaatttgctccaagtgcctctgcattctttggaatgtcacgcattggcatggaagtcacaccttcgggaacatggctgacttatcatggagccattaaattggatgacaaagatccacaattcaaagacaacgtcatactgctgaacaagcacattgacgcatacaaaacattcccaccaacagagcctaaaaaggacaaaaagaaaaagactgatgaagctcagcctttgccgcagagacaaaagaagcagcccactgtgactcttcttcctgcggctgacatggatgatttctccagacaacttcaaaattccatgagtggagcttctgctgattcaactcaggcataaacactcatgatgaccacacaaggcagatgggctatgtaaacgttttcgcaattccgtttacgatacatagtctactcttgtgcagaatgaattctcgtaactaaacagcacaagtaggtttagttaactttaatctcacatagcaatctttaatcaatgtgtaacattagggaggacttgaaagagccaccacattttcatcgaggccacgcggagtacgatcgagggtacagtgaataatgctagggagagctgcctatatggaagagccctaatgtgtaaaattaattttagtagtgctatccccatgtgattttaatagcttcttaggagaatgacaaaaaaaaaaaaaaaaaaaaaaaaaagggtcggcatggcatctccacctcctcgcggtccgacctgggcatccgaaggaggacgcacgtccactcggatggctaagggagagcctgcagtagcataaccccttggggcctctaaacgggtcttgaggggttttttg

SEQ ID NO: 33 - DNA, 35937 bp, Artificial Sequence
  T7-scv1-luc-GFP replicon
gcggccgctaatacgactcactatagatattaggtttttacctacccaggaaaagccaaccaacctcgatctcttgtagatctgttctctaaacgaactttaaaatctgtgtagctgtcgctcggctgcatgcctagtgcacctacgcagtataaacaataataaattttactgtcgttgacaagaaacgagtaactcgtccctcttctgcagactgcttacggtttcgtccgtgttgcagtcgatcatcagcatacctaggtttcgtccgggtgtgaccgaaaggtaagatggagagccttgttcttggtgtcaacgagaaaacacacgtccaactcagtttgcctgtccttcaggttagagacgtgctagtgcgtggcttcggggactctgtggaagaggccctatcggaggcacgtgaacacctcaaaaatggcacttgtggtctagtagagctggaaaaaggcgtactgccccagcttgaacagccctatgtgttcattaaacgttctgatgccttaagcaccaatcacggccacaaggtcgttgagctggttgcagaaatggacggcattcagtacggtcgtagcggtataacactgggagtactcgtgccacatgtgggcgaaaccccaattgcataccgcaatgttcttcttcgtaagaacggtaataagggagccggtggtcatagctatggcatcgatctaaagtcttatgacttaggtgacgagcttggcactgatcccattgaagattatgaacaaaactggaacactaagcatggcagtggtgcactccgtgaactcactcgtgagctcaatggaggtgcagtcactcgctatgtcgacaacaatttctgtggcccagatgggtaccctcttgattgcatcaaagattttctcgcacgcgcgggcaagtcaatgtgcactctttccgaacaacttgattacatcgagtcgaagagaggtgtctactgctgccgtgaccatgagcatgaaattgcctggttcactgagcgctctgataagagctacgagcaccagacacccttcgaaattaagagtgccaagaaatttgacactttcaaaggggaatgcccaaagtttgtgtttcctcttaactcaaaagtcaaagtcattcaaccacgtgttgaaaagaaaaagactgagggtttcatggggcgtatacgctctgtgtaccctgttgcatctccacaggagtgtaacaatatgcacttgtctaccttgatgaaatgtaatcattgcgatgaagtttcatggcagacgtgcgactttctgaaagccacttgtgaacattgtggcactgaaaatttagttattgaaggacctactacatgtgggtacctacctactaatgctgtagtgaaaatgccatgtcctgcctgtcaagacccagagattggacctgagcatagtgttgcagattatcacaaccactcaaacattgaaactcgactccgcaagggaggtaggactagatgttttggaggctgtgtgtttgcctatgttggctgctataataagcgtgcctactgggttcctcgtgctagtgctgatattggctcaggccatactggcattactggtgacaatgtggagaccttgaatgaggatctccttgagatactgagtcgtgaacgtgttaacattaacattgttggcgattttcatttgaatgaagaggttgccatcattttggcatctttctctgcttctacaagtgcctttattgacactataaagagtcttgattacaagtctttcaaaaccattgttgagtcctgcggtaactataaagttaccaagggaaagcccgtaaaaggtgcttggaacattggacaacagagatcagttttaacaccactgtgtggttttccctcacaggctgctggtgttatcagatcaatttttgcgcgcacacttgatgcagcaaaccactcaattcctgatttgcaaagagcagctgtcaccatacttgatggtatttctgaacagtcattacgtcttgtcgacgccatggtttatacttcagacctgctcaccaacagtgtcattattatggcatatgtaactggtggtcttgtacaacagacttctcagtggttgtctaatcttttgggcactactgttgaaaaactcaggcctatctttgaatggattgaggcgaaacttagtgcaggagttgaatttctcaaggatgcttgggagattctcaaatttctcattacaggtgtttttgacatcgtcaagggtcaaatacaggttgcttcagataacatcaaggattgtgtaaaatgcttcattgatgttgttaacaaggcactcgaaatgtgcattgatcaagtcactatcgctggcgcaaagttgcgatcactcaacttaggtgaagtcttcatcgctcaaagcaagggactttaccgtcagtgtatacgtggcaaggagcagctgcaactactcatgcctcttaaggcaccaaaagaagtaacctttcttgaaggtgattcacatgacacagtacttacctctgaggaggttgttctcaagaacggtgaactcgaagcactcgagacgcccgttgatagcttcacaaatggagctatcgttggcacaccagtctgtgtaaatggcctcatgctcttagagattaaggacaaagaacaatactgcgcattgtctcctggtttactggctacaaacaatgtctttcgcttaaaagggggtgcaccaattaaaggtgtaacctttggagaagatactgtttgggaagttcaaggttacaagaatgtgagaatcacatttgagcttgatgaacgtgttgacaaagtgcttaatgaaaagtgctctgtctacactgttgaatccggtaccgaagttactgagtttgcatgtgttgtagcagaggctgttgtgaagactttacaaccagtttctgatctccttaccaacatgggtattgatcttgatgagtggagtgtagctacattctacttatttgatgatgctggtgaagaaaacttttcatcacgtatgtattgttccttttaccctccagatgaggaagaagaggacgatgcagagtgtgaggaagaagaaattgatgaaacctgtgaacatgagtacggtacagaggatgattatcaaggtctccctctggaatttggtgcctcagctgaaacagttcgagttgaggaagaagaagaggaagactggctggatgatactactgagcaatcagagattgagccagaaccagaacctacacctgaagaaccagttaatcagtttactggttatttaaaacttactgacaatgttgccattaaatgtgttgacatcgttaaggaggcacaaagtgctaatcctatggtgattgtaaatgctgctaacatacacctgaaacatggtggtggtgtagcaggtgcactcaacaaggcaaccaatggtgccatgcaaaaggagagtgatgattacattaagctaaatggccctcttacagtaggagggtcttgtttgctttctggacataatcttgctaagaagtgtctgcatgttgttggacctaacctaaatgcaggtgaggacatccagcttcttaaggcagcatatgaaaatttcaattcacaggacatcttacttgcaccattgttgtcagcaggcatatttggtgctaaaccacttcagtctttacaagtgtgcgtgcagacggttcgtacacaggtttatattgcagtcaatgacaaagctctttatgagcaggttgtcatggattatcttgataacctgaagcctagagtggaagcacctaaacaagaggagccaccaaacacagaagattccaaaactgaggagaaatctgtcgtacagaagcctgtcgatgtgaagccaaaaattaaggcctgcattgatgaggttaccacaacactggaagaaactaagtttcttaccaataagttactcttgtttgctgatatcaatggtaagctttaccatgattctcagaacatgcttagaggtgaagatatgtctttccttgagaaggatgcaccttacatggtaggtgatgttatcactagtggtgatatcacttgtgttgtaataccctccaaaaaggctggtggcactactgagatgctctcaagagctttgaagaaagtgccagttgatgagtatataaccacgtaccctggacaaggatgtgctggttatacacttgaggaagctaagactgctcttaagaaatgcaaatctgcattttatgtactaccttcagaagcacctaatgctaaggaagagattctaggaactgtatcctggaatttgagagaaatgcttgctcatgctgaagagacaagaaaattaatgcctatatgcatggatgttagagccataatggcaaccatccaacgtaagtataaaggaattaaaattcaagagggcatcgttgactatggtgtccgattcttcttttatactagtaaagagcctgtagcttctattattacgaagctgaactctctaaatgagccgcttgtcacaatgccaattggttatgtgacacatggttttaatcttgaagaggctgcgcgctgtatgcgttctcttaaagctcctgccgtagtgtcagtatcatcaccagatgctgttactacatataatggatacctcacttcgtcatcaaagacatctgaggagcactttgtagaaacagtttctttggctggctcttacagagattggtcctattcaggacagcgtacagagttaggtgttgaatttcttaagcgtggtgacaaaattgtgtaccacactctggagagccccgtcgagtttcatcttgacggtgaggttctttcacttgacaaactaaagagtctcttatccctgcgggaggttaagactataaaagtgttcacaactgtggacaacactaatctccacacacagcttgtggatatgtctatgacatatggacagcagtttggtccaacatacttggatggtgctgatgttacaaaaattaaacctcatgtaaatcatgagggtaagactttctttgtactacctagtgatgacacactacgtagtgaagctttcgagtactaccatactcttgatgagagttttcttggtaggtacatgtctgctttaaaccacacaaagaaatggaaatttcctcaagttggtggtttaacttcaattaaatgggctgataacaattgttatttgtctagtgttttattagcacttcaacagcttgaagtcaaattcaatgcaccagcacttcaagaggcttattatagagcccgtgctggtgatgctgctaacttttgtgcactcatactcgcttacagtaataaaactgttggcgagcttggtgatgtcagagaaactatgacccatcttctacagcatgctaatttggaatctgcaaagcgagttcttaatgtggtgtgtaaacattgtggtcagaaaactactaccttaacgggtgtagaagctgtgatgtatatgggtactctatcttatgataatcttaagacaggtgtttccattccatgtgtgtgtggtcgtgatgctacacaatatctagtacaacaagagtcttcttttgttatgatgtctgcaccacctgctgagtataaattacagcaaggtacattcttatgtgcgaatgagtacactggtaactatcagtgtggtcattacactcatataactgctaaggagaccctctatcgtattgacggagctcaccttacaaagatgtcagagtacaaaggaccagtgactgatgttttctacaaggaaacatcttacactacaaccatcaagcctgtgtcgtataaactcgatggagttacttacacagagattgaaccaaaattggatgggtattataaaaaggataatgcttactatacagagcagcctatagaccttgtaccaactcaaccattaccaaatgcgagttttgataatttcaaactcacatgttctaacacaaaatttgctgatgatttaaatcaaatgacaggcttcacaaagccagcttcacgagagctatctgtcacattcttcccagacttgaatggcgatgtagtggctattgactatagacactattcagcgagtttcaagaaaggtgctaaattactgcataagccaattgtttggcacattaaccaggctacaaccaagacaacgttcaaaccaaacacttggtgtttacgttgtctttggagtacaaagccagtagatacttcaaattcatttgaagttctggcagtagaagacacacaaggaatggacaatcttgcttgtgaaagtcaacaacccacctctgaagaagtagtggaaaatcctaccatacagaaggaagtcatagagtgtgacgtgaaaactaccgaagttgtaggcaatgtcatacttaaaccatcagatgaaggtgttaaagtaacacaagagttaggtcatgaggatcttatggctgcttatgtggaaaacacaagcattaccattaagaaacctaatgagctttcactagccttaggtttaaaaacaattgccactcatggtattgctgcaattaatagtgttccttggagtaaaattttggcttatgtcaaaccattcttaggacaagcagcaattacaacatcaaattgcgctaagagattagcacaacgtgtgtttaacaattatatgccttatgtgtttacattattgttccaattgtgtacttttactaaaagtaccaattctagaattagagcttcactacctacaactattgctaaaaatagtgttaagagtgttgctaaattatgtttggatgccggcattaattatgtgaagtcacccaaattttctaaattgttcacaatcgctatgtggctattgttgttaagtatttgcttaggttctctaatctgtgtaactgctgcttttggtgtactcttatctaattttggtgctccttcttattgtaatggcgttagagaattgtatcttaattcgtctaacgttactactatggatttctgtgaaggttcttttccttgcagcatttgtttaagtggattagactcccttgattcttatccagctcttgaaaccattcaggtgacgatttcatcgtacaagctagacttgacaattttaggtctggccgctgagtgggttttggcatatatgttgttcacaaaattcttttatttattaggtctttcagctataatgcaggtgttctttggctattttgctagtcatttcatcagcaattcttggctcatgtggtttatcattagtattgtacaaatggcacccgtttctgcaatggttaggatgtacatcttctttgcttctttctactacatatggaagagctatgttcatatcatggatggttgcacctcttcgacttgcatgatgtgctataagcgcaatcgtgccacacgcgttgagtgtacaactattgttaatggcatgaagagatctttctatgtctatgcaaatggaggccgtggcttctgcaagactcacaattggaattgtctcaattgtgacacattttgcactggtagtacattcattagtgatgaagttgctcgtgatttgtcactccagtttaaaagaccaatcaaccctactgaccagtcatcgtatattgttgatagtgttgctgtgaaaaatggcgcgcttcacctctactttgacaaggctggtcaaaagacctatgagagacatccgctctcccattttgtcaatttagacaatttgagagctaacaacactaaaggttcactgcctattaatgtcatagtttttgatggcaagtccaaatgcgacgagtctgcttctaagtctgcttctgtgtactacagtcagctgatgtgccaacctattctgttgcttgaccaagttcttgtatcagacgttggagatagtactgaagtttccgttaagatgtttgatgcttatgtcgacaccttttcagcaacttttagtgttcctatggaaaaacttaaggcacttgttgctacagctcacagcgagttagcaaagggtgtagctttagatggtgtcctttctacattcgtgtcagctgcccgacaaggtgttgttgataccgatgttgacacaaaggatgttattgaatgtctcaaactttcacatcactctgacttagaagtgacaggtgacagttgtaacaatttcatgctcacctataataaggttgaaaacatgacgcccagagatcttggcgcatgtattgactgtaatgcaaggcatatcaatgcccaagtagcaaaaagtcacaatgtttcactcatctggaatgtaaaagactacatgtctttatctgaacagctgcgtaaacaaattcgtagtgctgccaagaagaacaacataccttttagactaacttgtgctacaactagacaggttgtcaatgtcataactactaaaatctcactcaagggtggtaagattgttagtacttgttttaaacttatgcttaaggccacattattgtgcgttcttgctgcattggtttgttatatcgttatgccagtacatacattgtcaatccatgatggttacacaaatgaaatcattggttacaaagccattcaggatggtgtcactcgtgacatcatttctactgatgattgttttgcaaataaacatgctggttttgacgcatggtttagccagcgtggtggttcatacaaaaatgacaaaagctgccctgtagtagctgctatcattacaagagagattggtttcatagtgcctggcttaccgggtactgtgctgagagcaatcaatggtgacttcttgcattttctacctcgtgtttttagtgctgttggcaacatttgctacacaccttccaaactcattgagtatagtgattttgctacctctgcttgcgttcttgctgctgagtgtacaatttttaaggatgctatgggcaaacctgtgccatattgttatgacactaatttgctagagggttctatttcttatagtgagcttcgtccagacactcgttatgtgcttatggatggttccatcatacagtttcctaacacttacctggagggttctgttagagtagtaacaacttttgatgctgagtactgtagacatggtacatgcgaaaggtcagaagtaggtatttgcctatctaccagtggtagatgggttcttaataatgagcattacagagctctatcaggagttttctgtggtgttgatgcgatgaatctcatagctaacatctttactcctcttgtgcaacctgtgggtgctttagatgtgtctgcttcagtagtggctggtggtattattgccatattggtgacttgtgctgcctactactttatgaaattcagacgtgtttttggtgagtacaaccatgttgttgctgctaatgcacttttgtttttgatgtctttcactatactctgtctggtaccagcttacagctttctgccgggagtctactcagtcttttacttgtacttgacattctatttcaccaatgatgtttcattcttggctcaccttcaatggtttgccatgttttctcctattgtgcctttttggataacagcaatctatgtattctgtatttctctgaagcactgccattggttctttaacaactatcttaggaaaagagtcatgtttaatggagttacatttagtaccttcgaggaggctgctttgtgtacctttttgctcaacaaggaaatgtacctaaaattgcgtagcgagacactgttgccacttacacagtataacaggtatcttgctctatataacaagtacaagtatttcagtggagccttagatactaccagctatcgtgaagcagcttgctgccacttagcaaaggctctaaatgactttagcaactcaggtgctgatgttctctaccaaccaccacagacatcaatcacttctgctgttctgcagagtggttttaggaaaatggcattcccgtcaggcaaagttgaagggtgcatggtacaagtaacctgtggaactacaactcttaatggattgtggttggatgacacagtatactgtccaagacatgtcatttgcacagcagaagacatgcttaatcctaactatgaagatctgctcattcgcaaatccaaccatagctttcttgttcaggctggcaatgttcaacttcgtgttattggccattctatgcaaaattgtctgcttaggcttaaagttgatacttctaaccctaagacacccaagtataaatttgtccgtatccaacctggtcaaacattttcagttctagcatgctacaatggttcaccatctggtgtttatcagtgtgccatgagacctaatcataccattaaaggttctttccttaatggatcatgtggtagtgttggttttaacattgattatgattgcgtgtctttctgctatatgcatcatatggagcttccaacaggagtacacgctggtactgacttagaaggtaaattctatggtccatttgttgacagacaaactgcacaggctgcaggtacagacacaaccataacattaaatgttttggcatggctgtatgctgctgttatcaatggtgataggtggtttcttaatagattcaccactactttgaatgactttaaccttgtggcaatgaagtacaactatgaacctttgacacaagatcatgttgacatattgggacctctttctgctcaaacaggaattgccgtcttagatatgtgtgctgctttgaaagagctgctgcagaatggtatgaatggtcgtactatccttggtagcactattttagaagatgagtttacaccatttgatgttgttagacaatgctctggtgttaccttccaaggtaagttcaagaaaattgttaagggcactcatcattggatgcttttaactttcttgacatcactattgattcttgttcaaagtacacagtggtcactgtttttctttgtttacgagaatgctttcttgccatttactcttggtattatggcaattgctgcatgtgctatgctgcttgttaagcataagcacgcattcttgtgcttgtttctgttaccttctcttgcaacagttgcttactttaatatggtctacatgcctgctagctgggtgatgcgtatcatgacatggcttgaattggctgacactagcttgtctggttataggcttaaggattgtgttatgtatgcttcagctttagttttgcttattctcatgacagctcgcactgtttatgatgatgctgctagacgtgtttggacactgatgaatgtcattacacttgtttacaaagtctactatggtaatgctttagatcaagctatttccatgtgggccttagttatttctgtaacctctaactattctggtgtcgttacgactatcatgtttttagctagagctatagtgtttgtgtgtgttgagtattacccattgttatttattactggcaacaccttacagtgtatcatgcttgtttattgtttcttaggctattgttgctgctgctactttggccttttctgtttactcaaccgttacttcaggcttactcttggtgtttatgactacttggtctctacacaagaatttaggtatatgaactcccaggggcttttgcctcctaagagtagtattgatgctttcaagcttaacattaagttgttgggtattggaggtaaaccatgtatcaaggttgctactgtacagtctaaaatgtctgacgtaaagtgcacatctgtggtactgctctcggttcttcaacaacttagagtagagtcatcttctaaattgtgggcacaatgtgtacaactccacaatgatattcttcttgcaaaagacacaactgaagctttcgagaagatggtttctcttttgtctgttttgctatccatgcagggtgctgtagacattaataggttgtgcgaggaaatgctcgataaccgtgctactcttcaggctattgcttcagaatttagttctttaccatcatatgccgcttatgccactgcccaggaggcctatgagcaggctgtagctaatggtgattctgaagtcgttctcaaaaagttaaagaaatctttgaatgtggctaaatctgagtttgaccgtgatgctgccatgcaacgcaagttggaaaagatggcagatcaggctatgacccaaatgtacaaacaggcaagatctgaggacaagagggcaaaagtaactagtgctatgcaaacaatgctcttcactatgcttaggaagcttgataatgatgcacttaacaacattatcaacaatgcgcgtgatggttgtgttccactcaacatcataccattgactacagcagccaaactcatggttgttgtccctgattatggtacctacaagaacacttgtgatggtaacacctttacatatgcatctgcactctgggaaatccagcaagttgttgatgcggatagcaagattgttcaacttagtgaaattaacatggacaattcaccaaatttggcttggcctcttattgttacagctctaagagccaactcagctgttaaactacagaataatgaactgagtccagtagcactacgacagatgtcctgtgcggctggtaccacacaaacagcttgtactgatgacaatgcacttgcctactataacaattcgaagggaggtaggtttgtgctggcattactatcagaccaccaagatctcaaatgggctagattccctaagagtgatggtacaggtacaatttacacagaactggaaccaccttgtaggtttgttacagacacaccaaaagggcctaaagtgaaatacttgtacttcatcaaaggcttaaacaacctaaatagaggtatggtgctgggcagtttagctgctacagtacgtcttcaggctggaaatgctacagaagtacctgccaattcaactgtgctttccttctgtgcttttgcagtagaccctgctaaagcatataaggattacctagcaagtggaggacaaccaatcaccaactgtgtgaagatgttgtgtacacacactggtacaggacaggcaattactgtaacaccagaagctaacatggaccaagagtcctttggtggtgcttcatgttgtctgtattgtagatgccacattgaccatccaaatcctaaaggattctgtgacttgaaaggtaagtacgtccaaatacctaccacttgtgctaatgacccagtgggttttacacttagaaacacagtctgtaccgtctgcggaatgtggaaaggttatggctgtagttgtgaccaactccgcgaacccttgatgcagtctgcggatgcatcaacgtttttaaacgggtttgcggtgtaagtgcagcccgtcttacaccgtgcggcacaggcactagtactgatgtcgtctacagggcttttgatatttacaacgaaaaagttgctggttttgcaaagttcctaaaaactaattgctgtcgcttccaggagaaggatgaggaaggcaatttattagactcttactttgtagttaagaggcatactatgtctaactaccaacatgaagagactatttataacttggttaaagattgtccagcggttgctgtccatgactttttcaagtttagagtagatggtgacatggtaccacatatatcacgtcagcgtctaactaaatacacaatggctgatttagtctatgctctacgtcattttgatgagggtaattgtgatacattaaaagaaatactcgtcacatacaattgctgtgatgatgattatttcaataagaaggattggtatgacttcgtagagaatcctgacatcttacgcgtatatgctaacttaggtgagcgtgtacgccaatcattattaaagactgtacaattctgcgatgctatgcgtgatgcaggcattgtaggcgtactgacattagataatcaggatcttaatgggaactggtacgatttcggtgatttcgtacaagtagcaccaggctgcggagttcctattgtggattcatattactcattgctgatgcccatcctcactttgactagggcattggctgctgagtcccatatggatgctgatctcgcaaaaccacttattaagtgggatttgctgaaatatgattttacggaagagagactttgtctcttcgaccgttattttaaatattgggaccagacataccatcccaattgtattaactgtttggatgataggtgtatccttcattgtgcaaactttaatgtgttattttctactgtgtttccacctacaagttttggaccactagtaagaaaaatatttgtagatggtgttccttttgttgtttcaactggataccattttcgtgagttaggagtcgtacataatcaggatgtaaacttacatagctcgcgtctcagtttcaaggaacttttagtgtatgctgctgatccagctatgcatgcagcttctggcaatttattgctagataaacgcactacatgcttttcagtagctgcactaacaaacaatgttgcttttcaaactgtcaaacccggtaattttaataaagacttttatgactttgctgtgtctaaaggtttctttaaggaaggaagttctgttgaactaaaacacttcttctttgctcaggatggcaacgctgctatcagtgattatgactattatcgttataatctgccaacaatgtgtgatatcagacaactcctattcgtagttgaagttgttgataaatactttgattgttacgatggtggctgtattaatgccaaccaagtaatcgttaacaatctggataaatcagctggtttcccatttaataaatggggtaaggctagactttattatgactcaatgagttatgaggatcaagatgcacttttcgcgtatactaagcgtaatgtcatccctactataactcaaatgaatcttaagtatgccattagtgcaaagaatagagctcgcaccgtagctggtgtctctatctgtagtactatgacaaatagacagtttcatcagaaattattgaagtcaatagccgccactagaggagctactgtggtaattggaacaagcaagttttacggtggctggcataatatgttaaaaactgtttacagtgatgtagaaactccacaccttatgggttgggattatccaaaatgtgacagagccatgcctaacatgcttaggataatggcctctcttgttcttgctcgcaaacataacacttgctgtaacttatcacaccgtttctacaggttagctaacgagtgtgcgcaagtattaagtgagatggtcatgtgtggcggctcactatatgttaaaccaggtggaacatcatccggtgatgctacaactgcttatgctaatagtgtctttaacatttgtcaagctgttacagccaatgtaaatgcacttctttcaactgatggtaataagatagctgacaagtatgtccgcaatctacaacacaggctctatgagtgtctctatagaaatagggatgttgatcatgaattcgtggatgagttttacgcttacctgcgtaaacatttctccatgatgattctttctgatgatgccgttgtgtgctataacagtaactatgcggctcaaggtttagtagctagcattaagaactttaaggcagttctttattatcaaaataatgtgttcatgtctgaggcaaaatgttggactgagactgaccttactaaaggacctcacgaattttgctcacagcatacaatgctagttaaacaaggagatgattacgtgtacctgccttacccagatccatcaagaatattaggcgcaggctgttttgtcgatgatattgtcaaaacagatggtacacttatgattgaaaggttcgtgtcactggctattgatgcttacccacttacaaaacatcctaatcaggagtatgctgatgtctttcacttgtatttacaatacattagaaagttacatgatgagcttactggccacatgttggacatgtattccgtaatgctaactaatgataacacctcacggtactgggaacctgagttttatgaggctatgtacacaccacatacagtcttgcaggctgtaggtgcttgtgtattgtgcaattcacagacttcacttcgttgcggtgcctgtattaggagaccattcctatgttgcaagtgctgctatgaccatgtcatttcaacatcacacaaattagtgttgtctgttaatccctatgtttgcaatgccccaggttgtgatgtcactgatgtgacacaactgtatctaggaggtatgagctattattgcaagtcacataagcctcccattagttttccattatgtgctaatggtcaggtttttggtttatacaaaaacacatgtgtaggcagtgacaatgtcactgacttcaatgcgatagcaacatgtgattggactaatgctggcgattacatacttgccaacacttgtactgagagactcaagcttttcgcagcagaaacgctcaaagccactgaggaaacatttaagctgtcatatggtattgctactgtacgcgaagtactctctgacagagaattgcatctttcatgggaggttggaaaacctagaccaccattgaacagaaactatgtctttactggttaccgtgtaactaaaaatagtaaagtacagattggagagtacacctttgaaaaaggtgactatggtgatgctgttgtgtacagaggtactacgacatacaagttgaatgttggtgattactttgtgttgacatctcacactgtaatgccacttagtgcacctactctagtgccacaagagcactatgtgagaattactggcttgtacccaacactcaacatctcagatgagttttctagcaatgttgcaaattatcaaaaggtcggcatgcaaaagtactctacactccaaggaccacctggtactggtaagagtcattttgccatcggacttgctctctattacccatctgctcgcatagtgtatacggcatgctctcatgcagctgttgatgccctatgtgaaaaggcattaaaatatttgcccatagataaatgtagtagaatcatacctgcgcgtgcgcgcgtagagtgttttgataaattcaaagtgaattcaacactagaacagtatgttttctgcactgtaaatgcattgccagaaacaactgctgacattgtagtctttgatgaaatctctatggctactaattatgacttgagtgttgtcaatgctagacttcgtgcaaaacactacgtctatattggcgatcctgctcaattaccagccccccgcacattgctgactaaaggcacactagaaccagaatattttaattcagtgtgcagacttatgaaaacaataggtccagacatgttccttggaacttgtcgccgttgtcctgctgaaattgttgacactgtgagtgctttagtttatgacaataagctaaaagcacacaaggataagtcagctcaatgcttcaaaatgttctacaaaggtgttattacacatgatgtttcatctgcaatcaacagacctcaaataggcgttgtaagagaatttcttacacgcaatcctgcttggagaaaagctgtttttatctcaccttataattcacagaacgctgtagcttcaaaaatcttaggattgcctacgcagactgttgattcatcacagggttctgaatatgactatgtcatattcacacaaactactgaaacagcacactcttgtaatgtcaaccgcttcaatgtggctatcacaagggcaaaaattggcattttgtgcataatgtctgatagagatctttatgacaaactgcaatttacaagtctagaaataccacgtcgcaatgtggctacattacaagcagaaaatgtaactggactttttaaggactgtagtaagatcattactggtcttcatcctacacaggcacctacacacctcagcgttgatataaagttcaagactgaaggattatgtgttgacataccaggcataccaaaggacatgacctaccgtagactcatctctatgatgggtttcaaaatgaattaccaagtcaatggttaccctaatatgtttatcacccgcgaagaagctattcgtcacgttcgtgcgtggattggctttgatgtagagggctgtcatgcaactagagatgctgtgggtactaacctacctctccagctaggattttctacaggtgttaacttagtagctgtaccgactggttatgttgacactgaaaataacacagaattcaccagagttaatgcaaaacctccaccaggtgaccagtttaaacatcttataccactcatgtataaaggcttgccctggaatgtagtgcgtattaagatagtacaaatgctcagtgatacactgaaaggattgtcagacagagtcgtgttcgtcctttgggcgcatggctttgagcttacatcaatgaagtactttgtcaagattggacctgaaagaacgtgttgtctgtgtgacaaacgtgcaacttgcttttctacttcatcagatacttatgcctgctggaatcattctgtgggttttgactatgtctataacccatttatgattgatgttcagcagtggggctttacgggtaaccttcagagtaaccatgaccaacattgccaggtacatggaaatgcacatgtggctagttgtgatgctatcatgactagatgtttagcagtccatgagtgctttgttaagcgcgttgattggtctgttgaataccctattataggagatgaactgagggttaattctgcttgcagaaaagtacaacacatggttgtgaagtctgcattgcttgctgataagtttccagttcttcatgacattggaaatccaaaggctatcaagtgtgtgcctcaggctgaagtagaatggaagttctacgatgctcagccatgtagtgacaaagcttacaaaatagaggagctcttctattcttatgctacacatcacgataaattcactgatggtgtttgtttgttttggaattgtaacgttgatcgttacccagccaatgcaattgtgtgtaggtttgacacaagagtcttgtcaaacttgaacttaccaggctgtgatggtggtagtttgtatgtgaataagcatgcattccacactccagctttcgataaaagtgcatttactaatttaaagcaattgcctttcttttactattctgatagtccttgtgagtctcatggcaaacaagtagtgtcggatattgattatgttccactcaaatctgctacgtgtattacacgatgcaatttaggtggtgctgtttgcagacaccatgcaaatgagtaccgacagtacttggatgcatataatatgatgatttctgctggatttagcctatggatttacaaacaatttgatacttataacctgtggaatacatttaccaggttacagagtttagaaaatgtggcttataatgttgttaataaaggacactttgatggacacgccggcgaagcacctgtttccatcattaataatgctgtttacacaaaggtagatggtattgatgtggagatctttgaaaataagacaacacttcctgttaatgttgcatttgagctttgggctaagcgtaacattaaaccagtgccagagattaagatactcaataatttgggtgttgatatcgctgctaatactgtaatctgggactacaaaagagaagccccagcacatgtatctacaataggtgtctgcacaatgactgacattgccaagaaacctactgagagtgcttgttcttcacttactgtcttgtttgatggtagagtggaaggacaggtagacctttttagaaacgcccgtaatggtgttttaataacagaaggttcagtcaaaggtctaacaccttcaaagggaccagcacaagctagcgtcaatggagtcacattaattggagaatcagtaaaaacacagtttaactactttaagaaagtagacggcattattcaacagttgcctgaaacctactttactcagagcagagacttagaggattttaagcccagatcacaaatggaaactgactttctcgagctcgctatggatgaattcatacagcgatataagctcgagggctatgccttcgaacacatcgtttatggagatttcagtcatggacaacttggcggtcttcatttaatgataggcttagccaagcgctcacaagattcaccacttaaattagaggattttatccctatggacagcacagtgaaaaattacttcataacagatgcgcaaacaggttcatcaaaatgtgtgtgttctgtgattgatcttttacttgatgactttgtcgagataataaagtcacaagatttgtcagtgatttcaaaagtggtcaaggttacaattgactatgctgaaatttcattcatgctttggtgtaaggatggacatgttgaaaccttctacccaaaactacaagcaagtcaagcgtggcaaccaggtgttgcgatgcctaacttgtacaagatgcaaagaatgcttcttgaaaagtgtgaccttcagaattatggtgaaaatgctgttataccaaaaggaataatgatgaatgtcgcaaagtatactcaactgtgtcaatacttaaatacacttactttagctgtaccctacaacatgagagttattcactttggtgctggctctgataaaggagttgcaccaggtacagctgtgctcagacaatggttgccaactggcacactacttgtcgattcagatcttaatgacttcgtctccgacgcagattctactttaattggagactgtgcaacagtacatacggctaataaatgggaccttattattagcgatatgtatgaccctaggaccaaacatgtgacaaaagagaatgactctaaagaagggtttttcacttatctgtgtggatttataaagcaaaaactagccctgggtggttctatagctgtaaagataacagagcattcttggaatgctgacctttacaagcttatgggccatttctcatggtggacagcttttgttacaaatgtaaatgcatcatcatcggaagcatttttaattggggctaactatcttggcaagccgaaggaacaaattgatggctataccatgcatgctaactacattttctggaggaacacaaatcctatccagttgtcttcctattcactctttgacatgagcaaatttcctcttaaattaagaggaactgctgtaatgtctcttaaggagaatcaaatcaatgatatgatttattctcttctggaaaaaggtaggcttatcattagagaaaacaacagagttgtggtttcaagtgatattcttgttaacaactaaacgaacatggaagatgccaaaaacattaagaagggcccagcgccattctacccactcgaagacgggaccgccggcgagcagctgcacaaagccatgaagcgctacgccctggtgcccggcaccatcgcctttaccgacgcacatatcgaggtggacattacctacgccgagtacttcgagatgagcgttcggctggcagaagctatgaagcgctatgggctgaatacaaaccatcggatcgtggtgtgcagcgagaatagcttgcagttcttcatgcccgtgttgggtgccctgttcatcggtgtggctgtggccccagctaacgacatctacaacgagcgcgagctgctgaacagcatgggcatcagccagcccaccgtcgtattcgtgagcaagaaagggctgcaaaagatcctcaacgtgcaaaagaagctaccgatcatacaaaagatcatcatcatggatagcaagaccgactaccagggcttccaaagcatgtacaccttcgtgacttcccatttgccacccggcttcaacgagtacgacttcgtgcccgagagcttcgaccgggacaaaaccatcgccctgatcatgaacagtagtggcagtaccggattgcccaagggcgtagccctaccgcaccgcaccgcttgtgtccgattcagtcatgcccgcgaccccatcttcggcaaccagatcatccccgacaccgctatcctcagcgtggtgccatttcaccacggcttcggcatgttcaccacgctgggctacttgatctgcggctttcgggtcgtgctcatgtaccgcttcgaggaggagctattcttgcgcagcttgcaagactataagattcaatctgccctgctggtgcccacactatttagcttcttcgctaagagcactctcatcgacaagtacgacctaagcaacttgcacgagatcgccagcggcggggcgccgctcagcaaggaggtaggtgaggccgtggccaaacgcttccacctaccaggcatccgccagggctacggcctgacagaaacaaccagcgccattctgatcacccccgaaggggacgacaagcctggcgcagtaggcaaggtggtgcccttcttcgaggctaaggtggtggacttggacaccggtaagacactgggtgtgaaccagcgcggcgagctgtgcgtccgtggccccatgatcatgagcggctacgttaacaaccccgaggctacaaacgctctcatcgacaaggacggctggctgcacagcggcgacatcgcctactgggacgaggacgagcacttcttcatcgtggaccggctgaagagcctgatcaaatacaagggctaccaggtagccccagccgaactggagagcatcctgctgcaacaccccaacatcttcgacgccggggtcgccggcctgcccgacgacgatgccggcgagctgcccgccgcagtcgtcgtgctggaacacggtaaaaccatgaccgagaaggagatcgtggactatgtggccagccaggttacaaccgccaagaagctgcgcggtggtgttgtgttcgtggacgaggtgcctaaaggactgaccggcaagttggacgcccgcaagatccgcgagattctcattaaggccaagaagggcggcaagatcgccgtgcagtcgacggtaccgcgggcccgggatccaccggtcgccaccatggtgagcaagggcgaggagctgttcaccggggtggtgcccatcctggtcgagctggacggcgacgtaaacggccacaagttcagcgtgtccggcgagggcgagggcgatgccacctacggcaagctgaccctgaagttcatctgcaccaccggcaagctgcccgtgccctggcccaccctcgtgaccaccctgacctacggcgtgcagtgcttcagccgctaccccgaccacatgaagcagcacgacttcttcaagtccgccatgcccgaaggctacgtccaggagcgcaccatcttcttcaaggacgacggcaactacaagacccgcgccgaggtgaagttcgagggcgacaccctggtgaaccgcatcgagctgaagggcatcgacttcaaggaggacggcaacatcctggggcacaagctggagtacaactacaacagccacaacgtctatatcatggccgacaagcagaagaacggcatcaaggtgaacttcaagatccgccacaacatcgaggacggcagcgtgcagctcgccgaccactaccagcagaacacccccatcggcgacggccccgtgctgctgcccgacaaccactacctgagcacccagtccgccctgagcaaagaccccaacgagaagcgcgatcacatggtcctgctggagttcgtgaccgccgccgggatcactctcggcatggacgagctgtacaagtaaacgaacttatggatttgtttatgagattttttactcttggatcaattactgcacagccagtaaaaattgacaatgcttctcctgcaagtactgttcatgctacagcaacgataccgctacaagcctcactccctttcggatggcttgttattggcgttgcatttcttgctgtttttcagagcgctaccaaaataattgcgctcaataaaagatggcagctagccctttataagggcttccagttcatttgcaatttactgctgctatttgttaccatctattcacatcttttgcttgtcgctgcaggtatggaggcgcaatttttgtacctctatgccttgatatattttctacaatgcatcaacgcatgtagaattattatgagatgttggctttgttggaagtgcaaatccaagaacccattactttatgatgccaactactttgtttgctggcacacacataactatgactactgtataccatataacagtgtcacagatacaattgtcgttactgaaggtgacggcatttcaacaccaaaactcaaagaagactaccaaattggtggttattctgaggataggcactcaggtgttaaagactatgtcgttgtacatggctatttcaccgaagtttactaccagcttgagtctacacaaattactacagacactggtattgaaaatgctacattcttcatctttaacaagcttgttaaagacccaccgaatgtgcaaatacacacaatcgacggctcttcaggagttgctaatccagcaatggatccaatttatgatgagccgacgacgactactagcgtgcctttgtaagcacaagaaagtgagtacgaacttatgatcgagcaggatggcctgcatgccggatctccagctgcctgggttgagagactgttcggctatgattgggcccagcagaccatcggctgttctgatgccgccgtgtttagactgagtgcccagggtagacccgtgctgttcgtgaaaaccgatctgtctggcgccctgaacgagctgcaggatgaagccgctagactgagctggctggctacaacaggcgtgccatgtgctgccgtgctggatgtggttacagaggccggaagagactggctgctgctgggagaagttccaggccaggatctgctgagcagtcatctggcccctgccgagaaggtgtccattatggccgatgccatgcggcggctgcacacacttgatcctgccacctgtcctttcgaccaccaagccaagcaccggatcgagagggccagaaccagaatggaagccggcctggtggaccaggacgacctggatgaagaacaccaaggactggccccagctgagctgttcgccagactgaaagccagaatgcccgacggcgaggatctggtggttacacatggggatgcctgcctgcctaacatcatggtggaaaacggccggttcagcggctttatcgactgtggcagactgggcgtcgccgacagatatcaggatatcgccctggccaccagagatatcgccgaagaacttggcggagagtgggccgatagattcctggtgctgtacggaatcgccgctcctgactctcagcggatcgccttctacagactgctggacgagttcttctaagtgacaacagatgtttcatcttgttgacttccaggttacaatagcagagatattgattatcattatgaggactttcaggattgctatttggaatcttgacgttataataagttcaatagtgagacaattatttaagcctctaactaagaagaattattcggagttagatgatgaagaacctatggagttagattatccataaaacgaacatgaaaattattctcttcctgacattgattgtatttacatcttgcgagctatatcactatcaggagtgtgttagaggtacgactgtactactaaaagaaccttgcccatcaggaacatacgagggcaattcaccatttcaccctcttgctgacaataaatttgcactaacttgcactagcacacactttgcttttgcttgtgctgacggtactcgacatacctatcagctgcgtgcaagatcagtttcaccaaaacttttcatcagacaagaggaggttcaacaagagctctactcgccactttttctcattgttgctgctctagtatttttaatactttgcttcaccattaagagaaagacagaatgaatgagctcactttaattgacttctatttgtgctttttagcctttctgctattccttgttttaataatgcttattatattttggttttcactcgaaatccaggatctagaagaaccttgtaccaaagtctaaacgaacatgaaacttctcattgttttgacttgtatttctctatgcagttgcatatgcactgtagtacagcgctgtgcatctaataaacctcatgtgcttgaagatccttgtaaggtacaacactaggggtaatacttatagcactgcttggctttgtgctctaggaaaggttttaccttttcatagatggcacactatggttcaaacatgcacacctaatgttactatcaactgtcaagatccagctggtggtgcgcttatagctaggtgttggtaccttcatgaaggtcaccaaactgctgcatttagagacgtacttgttgttttaaataaacgaacaaattaaaatgtctgataatggaccccaatcaaaccaacgtagtgccccccgcattacatttggtggacccacagattcaactgacaataaccagaatggaggacgcaatggggcaaggccaaaacagcgccgaccccaaggtttacccaataatactgcgtcttggttcacagctctcactcagcatggcaaggaggaacttagattccctcgaggccagggcgttccaatcaacaccaatagtggtccagatgaccaaattggctactaccgaagagctacccgacgagttcgtggtggtgacggcaaaatgaaagagctcagccccagatggtacttctattacctaggaactggcccagaagcttcacttccctacggcgctaacaaagaaggcatcgtatgggttgcaactgagggagccttgaatacacccaaagaccacattggcacccgcaatcctaataacaatgctgccaccgtgctacaacttcctcaaggaacaacattgccaaaaggcttctacgcagagggaagcagaggcggcagtcaagcctcttctcgctcctcatcacgtagtcgcggtaattcaagaaattcaactcctggcagcagtaggggaaattctcctgctcgaatggctagcggaggtggtgaaactgccctcgcgctattgctgctagacagattgaaccagcttgagagcaaagtttctggtaaaggccaacaacaacaaggccaaactgtcactaagaaatctgctgctgaggcatctaaaaagcctcgccaaaaacgtactgccacaaaacagtacaacgtcactcaagcatttgggagacgtggtccagaacaaacccaaggaaatttcggggaccaagacctaatcagacaaggaactgattacaaacattggccgcaaattgcacaatttgctccaagtgcctctgcattctttggaatgtcacgcattggcatggaagtcacaccttcgggaacatggctgacttatcatggagccattaaattggatgacaaagatccacaattcaaagacaacgtcatactgctgaacaagcacattgacgcatacaaaacattcccaccaacagagcctaaaaaggacaaaaagaaaaagactgatgaagctcagcctttgccgcagagacaaaagaagcagcccactgtgactcttcttcctgcggctgacatggatgatttctccagacaacttcaaaattccatgagtggagcttctgctgattcaactcaggcataaacactcatgatgaccacacaaggcagatgggctatgtaaacgttttcgcaattccgtttacgatacatagtctactcttgtgcagaatgaattctcgtaactaaacagcacaagtaggtttagttaactttaatctcacatagcaatctttaatcaatgtgtaacattagggaggacttgaaagagccaccacattttcatcgaggccacgcggagtacgatcgagggtacagtgaataatgctagggagagctgcctatatggaagagccctaatgtgtaaaattaattttagtagtgctatccccatgtgattttaatagcttcttaggagaatgacaaaaaaaaaaaaaaaaaaaaaaaaaagggtcggcatggcatctccacctcctcgcggtccgacctgggcatccgaaggaggacgcacgtccactcggatggctaagggagagcctgcagtagcataaccccttggggcctctaaacgggtcttgaggggttttttggcggccgcttctatagtgtcacctaaatactagtgactccagcgtaactggactggccacagttaggccgcaaatgtaatcacactggctcaccttcgggtgggcctttctgcgttcgcgagtggacccgataagctcatggagcggcgtaaccgtcgcacaggaaggacagagaaagcgcggatctgggaagtgacggacagaacggtcaggacctggattggggaggcggttgccgccgctgctgctgacggtgtgacgttctctgttccggtcacaccacatacgttccgccattcctatgcgatgcacatgctgtatgccggtataccgctgaaagttctgcaaagcctgatgggacataagtccatcagttcaacggaagtctacacgaaggtttttgcgctggatgtggctgcccggcaccgggtgcagtttgcgatgccggagtctgatgcggttgcgatgctgaaacaattatcctgagaataaatgccttggcctttatatggaaatgtggaactgagtggatatgctgtttttgtctgttaaacagagaagctggctgttatccactgagaagcgaacgaaacagtcgggaaaatctcccattatcgtagagatccgcattattaatctcaggagcctgtgtagcgtttataggaagtagtgttctgtcatgatgcctgcaagcggtaacgaaaacgatttgaatatgccttcaggaacaatagaaatcttcgtgcggtgttacgttgaagtggagcggattatgtcagcaatggacagaacaacctaatgaacacagaaccatgatgtggtctgtccttttacagccagtagtgctcgccgcagtcgagcgacagggcgaagccctcggctggttgccctcgccgctgggctggcggccgtctatggccctgcaaacgcgccagaaacgccgtcgaagccgtgtgcgagacaccgcggccggccgccggcgttgtggatacctcgcggaaaacttggccctcactgacagatgaggggcggacgttgacacttgaggggccgactcacccggcgcggcgttgacagatgaggggcaggctcgatttcggccggcgacgtggagctggccagcctcgcaaatcggcgaaaacgcctgattttacgcgagtttcccacagatgatgtggacaagcctggggataagtgccctgcggtattgacacttgaggggcgcgactactgacagatgaggggcgcgatccttgacacttgaggggcagagtgctgacagatgaggggcgcacctattgacatttgaggggctgtccacaggcagaaaatccagcatttgcaagggtttccgcccgtttttcggccaccgctaacctgtcttttaacctgcttttaaaccaatatttataaaccttgtttttaaccagggctgcgccctgtgcgcgtgaccgcgcacgccgaaggggggtgcccccccttctcgaaccctcccggtcgagtgagcgaggaagcaccagggaacagcacttatatattctgcttacacacgatgcctgaaaaaacttcccttggggttatccacttatccacggggatatttttataattattttttttatagtttttagatcttcttttttagagcgccttgtaggcctttatccatgctggttctagagaaggtgttgtgacaaattgccctttcagtgtgacaaatcaccctcaaatgacagtcctgtctgtgacaaattgcccttaaccctgtgacaaattgccctcagaagaagctgttttttcacaaagttatccctgcttattgactcttttttatttagtgtgacaatctaaaaacttgtcacacttcacatggatctgtcatggcggaaacagcggttatcaatcacaagaaacgtaaaaatagcccgcgaatcgtccagtcaaacgacctcactgaggcggcatatagtctctcccgggatcaaaaacgtatgctgtatctgttcgttgaccagatcagaaaatctgatggcaccctacaggaacatgacggtatctgcgagatccatgttgctaaatatgctgaaatattcggattgacctctgcggaagccagtaaggatatacggcaggcattgaagagtttcgcggggaaggaagtggttttttatcgccctgaagaggatgccggcgatgaaaaaggctatgaatcttttccttggtttatcaaacgtgcgcacagtccatccagagggctttacagtgtacatatcaacccatatctcattcccttctttatcgggttacagaaccggtttacgcagtttcggcttagtgaaacaaaagaaatcaccaatccgtatgccatgcgtttatacgaatccctgtgtcagtatcgtaagccggatggctcaggcatcgtctctctgaaaatcgactggatcatagagcgttaccagctgcctcaaagttaccagcgtatgcctgacttccgccgccgcttcctgcaggtctgtgttaatgagatcaacagcagaactccaatgcgcctctcatacattgagaaaaagaaaggccgccagacgactcatatcgtattttccttccgcgatatcacttccatgacgacaggatagtctgagggttatctgtcacagatttgagggtggttcgtcacatttgttctgacctactgagggtaatttgtcacagttttgctgtttccttcagcctgcatggattttctcatactttttgaactgtaatttttaaggaagccaaatttgagggcagtttgtcacagttgatttccttctctttcccttcgtcatgtgacctgatatcgggggttagttcgtcatcattgatgagggttgattatcacagtttattactctgaattggctatccgcgtgtgtacctctacctggagtttttcccacggtggatatttcttcttgcgctgagcgtaagagctatctgacagaacagttcttctttgcttcctcgccagttcgctcgctatgctcggttacacggctgcggcgagcgctagtgataataagtgactgaggtatgtgctcttcttatctccttttgtagtgttgctcttattttaaacaactttgcggttttttgatgactttgcgattttgttgttgctttgcagtaaattgcaagatttaataaaaaaacgcaaagcaatgattaaaggatgttcagaatgaaactcatggaaacacttaaccagtgcataaacgctggtcatgaaatgacgaaggctatcgccattgcacagtttaatgatgacagcccggaagcgaggaaaataacccggcgctggagaataggtgaagcagcggatttagttggggtttcttctcaggctatcagagatgccgagaaagcagggcgactaccgcacccggatatggaaattcgaggacgggttgagcaacgtgttggttatacaattgaacaaattaatcatatgcgtgatgtgtttggtacgcgattgcgacgtgctgaagacgtatttccaccggtgatcggggttgctgcccataaaggaggcgtttacaaaacctcagtttctgttcatcttgctcaggatctggctctgaaggggctacgtgttttgctcgtggaaggtaacgacccccagggaacagcctcaatgtatcacggatgggtaccagatcttcatattcatgcagaagacactctcctgcctttctatcttggggaaaaggacgatgtcacttatgcaataaagcccacttgctggccggggcttgacattattccttcctgtctggctctgcaccgtattgaaactgagttaatgggcaaatttgatgaaggtaaactgcccaccgatccacacctgatgctccgactggccattgaaactgttgctcatgactatgatgtcatagttattgacagcgcgcctaacctgggtatcggcacgattaatgtcgtatgtgctgctgatgtgctgattgttcccacgcctgctgagttgtttgactacacctccgcactgcagtttttcgatatgcttcgtgatctgctcaagaacgttgatcttaaagggttcgagcctgatgtacgtattttgcttaccaaatacagcaatagtaatggctctcagtccccgtggatggaggagcaaattcgggatgcctggggaagcatggttctaaaaaatgttgtacgtgaaacggatgaagttggtaaaggtcagatccggatgagaactgtttttgaacaggccattgatcaacgctcttcaactggtgcctggagaaatgctctttctatttgggaacctgtctgcaatgaaattttcgatcgtctgattaaaccacgctgggagattagataatgaagcgtgcgcctgttattccaaaacatacgctcaatactcaaccggttgaagatacttcgttatcgacaccagctgccccgatggtggattcgttaattgcgcgcgtaggagtaatggctcgcggtaatgccattactttgcctgtatgtggtcgggatgtgaagtttactcttgaagtgctccggggtgatagtgttgagaagacctctcgggtatggtcaggtaatgaacgtgaccaggagctgcttactgaggacgcactggatgatctcatcccttcttttctactgactggtcaacagacaccggcgttcggtcgaagagtatctggtgtcatagaaattgccgatgggagtcgccgtcgtaaagctgctgcacttaccgaaagtgattatcgtgttctggttggcgagctggatgatgagcagatggctgcattatccagattgggtaacgattatcgcccaacaagtgcttatgaacgtggtcagcgttatgcaagccgattgcagaatgaatttgctggaaatatttctgcgctggctgatgcggaaaatatttcacgtaagattattacccgctgtatcaacaccgccaaattgcctaaatcagttgttgctcttttttctcaccccggtgaactatctgcccggtcaggtgatgcacttcaaaaagcctttacagataaagaggaattacttaagcagcaggcatctaaccttcatgagcagaaaaaagctggggtgatatttgaagctgaagaagttatcactcttttaacttctgtgcttaaaacgtcatctgcatcaagaactagtttaagctcacgacatcagtttgctcctggagcgacagtattgtataagggcgataaaatggtgcttaacctggacaggtctcgtgttccaactgagtgtatagagaaaattgaggccattcttaaggaacttgaaaagccagcaccctgatgcgaccacgttttagtctacgtttatctgtctttacttaatgtcctttgttacaggccagaaagcataactggcctgaatattctctctgggcccactgttccacttgtatcgtcggtctgataatcagactgggaccacggtcccactcgtatcgtcggtctgattattagtctgggaccacggtcccactcgtatcgtcggtctgattattagtctgggaccacggtcccactcgtatcgtcggtctgataatcagactgggaccacggtcccactcgtatcgtcggtctgattattagtctgggaccatggtcccactcgtatcgtcggtctgattattagtctgggaccacggtcccactcgtatcgtcggtctgattattagtctggaaccacggtcccactcgtatcgtcggtctgattattagtctgggaccacggtcccactcgtatcgtcggtctgattattagtctgggaccacgatcccactcgtgttgtcggtctgattatcggtctgggaccacggtcccacttgtattgtcgatcagactatcagcgtgagactacgattccatcaatgcctgtcaagggcaagtattgacatggtcgtcgtaacctgtagaacggagtaacctcggtgtgcggttgtatgcctgctgtggattgctgctgtgtcctgcttatccacaacattttgcgcacggttatgtggacaaaatacctggttacccaggccgtgccggcacgttaaccgggctgcatccgatgcaagtgtgtcgctgtcgacgagctcgcgagctcggacatgaggttgccccgtattcagtgtcgctgatttgtattgtctgaagttgcttttacgttaagttgatgcagatcaattaatacgatacctgcgtcataattgattatttgacgtggtttgatggcctccacgcacgttgtgatatgtagatgataatcattatcactttacgggtcctttccggtgatccgacaggttacggggcggcgacctcgcgggttttcgctatttatgaaaattttccggtttaaggcgtttccgttcttcttcgtcataacttaatgtttttatttaaaataccctctgaaaagaaaggaaacgacaggtgctgaaagcgagctttttggcctctgtcgtttcctttctctgtttttgtccgtggaatgaacaatggaagtccgagctcatcgctaataacttcgtatagcatacattatacgaagttatattcgatgcggccgatctagcagaaagtcaaaagcctccgaccggaggcttttgacttctgtcacctaggttacgccccgccctgccactcatcgcagtactgttgtaattcattaagcattctgccgacatggaagccatcacaaacggcatgatgaacctgaatcgccagcggcatcagcaccttgtcgccttgcgtataatatttgcccatggtgaaaacgggggcgaagaagttgtccatattggccacgtttaaatcaaaactggtgaaactcacccagggattggctgagacgaaaaacatattctcaataaaccctttagggaaataggccaggttttcaccgtaacacgccacatcttgcgaatatatgtgtagaaactgccggaaatcgtcgtggtattcactccagagcgatgaaaacgtttcagtttgctcatggaaaacggtgtaacaagggtgaacactatcccatatcaccagctcaccgtctttcattgccatacgaaattccggatgagcattcatcaggcgggcaagaatgtgaataaaggccggataaaacttgtgcttatttttctttacggtctttaaaaaggccgtaatatccagctgaacggtctggttataggtacattgagcaactgactgaaatgcctcaaaatgttctttacgatgccattgggatatatcaacggtggtatatccagtgatttttttctccattttagcttccttagctcctgaaaatctcgataactcaaaaaatacgcccggtagtgatcttatttcattatggtgaaagttggaacctcttacgtgccgatcagattaaaacgaaaggcccagtctttcgactgagcctttcgttttatttgaccatgttggtatgatttaaattcagt

SEQ ID NO: 34 - protein, 933 aa, Artificial Sequence
  Synthetic sequence
SKDSNFLNRVRGSIVNARIEPCSSGLSTDVVFRAFDICNYKAKVAGIGKYYKTNTCRFVELDDQGHHLDSYFVVKRHTMENYELEKHCYDLLRDCDAVAPHDFFIFDVDKVKTPHIVRQRLTEYTMMDLVYALRHFDQNSEVLKAILVKYGCCDVTYFENKLWFDFVENPSVIGVYHKLGERVRQAILNTVKFCDHMVKAGLVGVLTLDNQDLNGKWYDFGDFVITQPGSGVAIVDSYYSYLMPVLSMTDCLAAETHRDCDFNKPLIEWPLTEYDFTDYKVQLFEKYFKYWDQTYHANCVNCTDDRCVLHCANFNVLFAMTMPKTCFGPIVRKIFVDGVPFVVSCGYHYKELGLVMNMDVSLHRHRLSLKELMMYAADPAMHIASSNAFLDLRTSCFSVAALTTGLTFQTVRPGNFNQDFYDFVVSKGFFKEGSSVTLKHFFFAQDGNAAITDYNYYSYNLPTMCDIKQMLFCMEVVNKYFEIYDGGCLNASEVVVNNLDKSAGHPFNKFGKARVYYESMSYQEQDELFAMTKRNVIPTMTQMNLKYAISAKNRARTVAGVSILSTMTNRQYHQKMLKSMAATRGATCVIGTTKFYGGWDFMLKTLYKDVDNPHLMGWDYPKCDRAMPNMCRIFASLILARKHGTCCTTRDRFYRLANECAQVLSEYVLCGGGYYVKPGGTSSGDATTAYANSVFNILQATTANVSALMGANGNKIVDKEVKDMQFDLYVNVYRSTSPDPKFVDKYYAFLNKHFSMMILSDDGVVCYNSDYAAKGYIAGIQNFKETLYYQNNVFMSEAKCWVETDLKKGPHEFCSQHTLYIKDGDDGYFLPYPDPSRILSAGCFVDDIVKTDGTLMVERFVSLAIDAYPLTKHEDIEYQNVFWVYLQYIEKLYKDLTGHMLDSYSVMLCGDNSAKFWEEAFYRDLYSSPTTLQ

SEQ ID NO: 35 - protein, 932 aa, Artificial Sequence
  Synthetic sequence
SADASTFLNRVCGVSAARLTPCGTGTSTDVVYRAFDIYNEKVAGFAKFLKTNCCRFQEKDEEGNLLDSYFVVKRHTMSNYQHEETIYNLVKDCPAVAVHDFFKFRVDGDMVPHISRQRLTKYTMADLVYALRHFDEGNCDTLKEILVTYNCCDDDYFNKKDWYDFVENPDILRVYANLGERVRQSLLKTVQFCDAMRDAGIVGVLTLDNQDLNGNWYDFGDFVQVAPGCGVPIVDSYYSLLMPILTLTRALAAESHMDADLAKPLIKWDLLKYDFTEERLCLFDRYFKYWDQTYHPNCINCLDDRCILHCANFNVLFSTVFPPTSFGPLVRKIFVDGVPFVVSTGYHFRELGVVHNQDVNLHSSRLSFKELLVYAADPAMHAASGNLLLDKRTTCFSVAALTNNVAFQTVKPGNFNKDFYDFAVSKGFFKEGSSVELKHFFFAQDGNAAISDYDYYRYNLPTMCDIRQLLFVVEVVDKYFDCYDGGCINANQVIVNNLDKSAGFPFNKWGKARLYYDSMSYEDQDALFAYTKRNVIPTITQMNLKYAISAKNRARTVAGVSICSTMTNRQFHQKLLKSIAATRGATVVIGTSKFYGGWHNMLKTVYSDVETPHLMGWDYPKCDRAMPNMLRIMASLVLARKHNTCCNLSHRFYRLANECAQVLSEMVMCGGSLYVKPGGTSSGDATTAYANSVFNICQAVTANVNALLSTDGNKIADKYVRNLQHRLYECLYRNRDVDHEFVDEFYAYLRKHFSMMILSDDAVVCYNSNYAAQGLVASIKNFKAVLYYQNNVFMSEAKCWTETDLTKGPHEFCSQHTMLVKQGDDYVYLPYPDPSRILGAGCFVDDIVKTDGTLMIERFVSLAIDAYPLTKHPNQEYADVFHLYLQYIRKLHDELTGHMLDMYSVMLTNDNTSRYWEPEFYEAMYTPHTVLQ
